(19) United States
(12) Patent Application Publication
(10) Pub. No.: US 2017/0306405 A1
(43) Pub. Date: Oct. 26, 2017

(54) DNA METHYLATION STATUS AS A BIOMARKER OF ALCOHOL USE AND ABSTINENCE

(71) Applicant: Robert Philibert, Iowa City, IA (US)

(72) Inventor: Robert Philibert, Iowa City, IA (US)

(21) Appl. No.: 15/519,503

(22) PCT Filed: May 28, 2015
(86) PCT No.: PCT/IB15/54041

§ 371 Date: Apr. 14, 2017

Related U.S. Application Data
(60) Provisional application No. 62/005,408, filed on May 30, 2014.

(51) Int. Cl. C12Q 1/68

(52) U.S. Cl. CPC C12Q 1/6883; C12Q 1/6827; C12Q 2600/154; C12Q 2523/125

(57) ABSTRACT

This disclosure provides methods and materials for determining whether or not an individual is using alcohol, and also for determining whether or not the individual has stopped using alcohol.

### CROSS REFERENCE TO RELATED APPLICATIONS

[0001] This application claims the benefit of U.S. Provisional Ser. No. 62/005,408 filed May 30, 2014. This disclosure of the prior application is considered part of (and is incorporated by reference in) the disclosure of this application.

### FEDERALLY SPONSORED RESEARCH OR DEVELOPMENT

[0002] This invention was made with government support under Grant No. R43AA022041 awarded by the National Institutes of Health. The government has certain rights in the invention.

### BACKGROUND

[0003] Alcoholism has a profound socio-economic and personal impact on tens of millions of individuals throughout the world. Unfortunately, the ability make the diagnosis is often hindered by the reliance on self-reporting, while the ability to monitor treatment response is challenged by the absence of robust and reliable biomarkers.

### SUMMARY

[0004] This disclosure provides for methods and materials that can be used to determine whether or not an individual is using alcohol, and also to determine whether or not the individual has stopped using alcohol.

[0005] In one aspect, a method of determining whether or not an individual uses alcohol is provided. Such a method typically includes determining the methylation status of at least one CpG dinucleotide in a biological sample from the individual; and correlating the methylation status of the at least one CpG dinucleotide to determine whether or not the individual uses alcohol.

[0006] In some embodiments, the at least one CpG dinucleotide comprises position 71389896 of chromosome 10. For example, demethylation at position 71389896 of chromosome 10 is indicative of previous or current alcohol use; and remethylation at position 71389896 of chromosome 10 is indicative of less or no alcohol use (e.g., abstinence).

[0007] In some embodiments, the at least one CpG dinucleotide comprises position 54677008 of chromosome 12. For example, demethylation at position 54677008 of chromosome 12 is indicative of previous or current alcohol use; and remethylation at position 54677008 of chromosome 12 is indicative of less or no alcohol use (e.g., abstinence).

[0008] In some embodiments, the at least one CpG dinucleotide comprises position 75262522 of chromosome 8. For example, demethylation at position 75262522 of chromosome 8 is indicative of previous or current alcohol use; and remethylation at position 75262522 of chromosome 8 is indicative of less or no alcohol use (e.g., abstinence).

[0009] In some embodiments, the at least one CpG dinucleotide comprises position 92137791 of chromosome 9. For example, demethylation at position 92137791 of chromosome 9 is indicative of previous or current alcohol use; and remethylation at position 92137791 of chromosome 9 is indicative of less or no alcohol use (e.g., abstinence). In some embodiments, the determining step includes contacting DNA in the biological sample with bisulfite under alkaline conditions to produce bisulfite-treated DNA; optionally, amplifying the bisulfite-treated DNA to produce amplified bisulfite-treated DNA; contacting the bisulfite-treated DNA or the amplified bisulfite-treated DNA with at least one oligonucleotide that is complementary to a sequence comprising the at least one CpG dinucleotide; and detecting the methylation status of the at least one CpG dinucleotide.

[0010] In some embodiments, the at least one oligonucleotide detects the CpG dinucleotide in the bisulfite-treated DNA in the unmethylated state. In some embodiments, the at least one oligonucleotide detects the CpG dinucleotide in the bisulfite-treated DNA in the methylated state. Representative biological samples include, without limitation, peripheral blood, lymphocytes, urine, saliva, and buccal cells. In some embodiments, the methylation status of the at least one CpG dinucleotide is determined using bi-sulfite treated DNA. In some embodiments, such a method further includes obtaining self-report data from the individual regarding whether or not the individual is user of alcohol.

[0011] In another aspect, a computer implemented method for determining whether or not an individual uses alcohol is provided. Such a method typically includes obtaining measured data associated with the user, the measured data comprising one or more measured CpG methylation status; generating a predictive score based on the obtained measured data; and providing a likelihood of alcohol use by the user based on the predictive score.

[0012] In some embodiments, such a method further includes determining the CpG methylation status for the user, wherein a change in methylation status is an indicator of alcohol use. In some embodiments, such a method further includes outputting a predicted level of alcohol use based on the predictive score.

[0013] In one aspect, a kit for determining the methylation status of at least one CpG dinucleotide is provided. Such a kit typically includes at least one first nucleic acid primer at least 8 nucleotides in length that is complementary to a bisulfite-converted nucleic acid sequence that includes at least one CpG dinucleotide, where the at least one first nucleic acid primer detects the methylated CpG dinucleotide. In some embodiments, the kit further includes at least one second nucleic acid primer at least 8 nucleotides in length that is complementary to a bisulfite-converted nucleic acid sequence that includes the at least one CpG dinucleotide, where the at least one second nucleic acid primer detects the unmethylated CpG dinucleotide.

[0014] In some embodiments, the first nucleic acid primer is complementary to a bisulfite-converted sequence that includes a methylated CpG dinucleotide at position 71389896 of chromosome 10. In some embodiments, the first nucleic acid primer is complementary to a bisulfite-converted sequence that includes an unmethylated CpG dinucleotide at position 71389896 of chromosome 10. In some embodiments, the first nucleic acid primer is complementary to a bisulfite-converted sequence that includes a methylated CpG dinucleotide at position 54677008 of chromosome 12. In some embodiments, the first nucleic acid primer is complementary to a bisulfite-converted sequence that includes an unmethylated CpG dinucleotide at position 54677008 of chromosome 12. In some embodiments, the first nucleic acid primer is complementary to a bisulfite-converted sequence that includes a methylated CpG dinucleotide at position 75262522 of chromosome 8. In some embodiments, the first nucleic acid primer is complementary to a bisulfite-converted sequence that includes an unmethylated CpG dinucleotide at position 75262522 of chromosome 8. In some embodiments, the first nucleic acid primer is complementary to a bisulfite-converted sequence that includes a methylated CpG dinucleotide at position 92137791 of chromosome 9. In some embodiments, the first nucleic acid primer is complementary to a bisulfite-converted sequence that includes an unmethylated CpG dinucleotide at position 92137791 of chromosome 9.

[0015] In some embodiments, a kit as described herein can include at least a third nucleic acid primer at least 8 nucleotides in length that is complementary to a nucleic acid sequence upstream of the CpG dinucleotide. In some embodiments, a kit as described herein can include at least a fourth nucleic acid primer at least 8 nucleotides in length that is complementary to a nucleic acid sequence downstream of the CpG dinucleotide. In some embodiments, the at least third nucleic acid primer is complementary to a bisulfite-converted nucleic acid sequence. In some embodiments, the at least fourth nucleic acid primer is complementary to a bisulfite-converted nucleic acid sequence.

[0016] In some embodiments, the at least one first nucleic acid primer, the at least one second nucleic acid primer, the at least one third nucleic acid primer, and/or the at least one fourth nucleic acid primer includes one or more nucleotide analogs. In some embodiments, the at least one first nucleic acid primer, the at least one second nucleic acid primer, the at least one third nucleic acid primer, and/or the at least one fourth nucleic acid primer includes one or more synthetic or non-natural nucleotides.

[0017] In some embodiments, the kit further includes a solid substrate to which the at least one first nucleic acid primer is bound. Representative solid substrates include, without limitation, polymers, glass, semiconductors, papers, metals, gels and/or hydrogels. In some embodiments, the solid substrate is a microarray or microfluidics card. In some embodiments, the kit further includes a detectable label. In some embodiments, such a kit further includes instructions for correlating a change in methylation status at one or more CpG positions with alcohol use.

[0018] Unless otherwise defined, all technical and scientific terms used herein have the same meaning as commonly understood by one of ordinary skill in the art to which the methods and compositions of matter belong. Although methods and materials similar or equivalent to those described herein can be used in the practice or testing of the methods and compositions of matter, suitable methods and materials are described below. In addition, the materials, methods, and examples are illustrative only and not intended to be limiting. All publications, patent applications, patents, and other references mentioned herein are incorporated by reference in their entirety.

### DESCRIPTION OF DRAWINGS

[0019] FIG. 1 is a graph showing Quantile-Quantile (QQ) plots of the comparison between the methylation status of DNA from the 32 case subjects (at time T1) and the methylation status of DNA from the 33 abstinent controls.

[0020] FIG. 2 is a graph showing QQ plots of the comparison between the methylation status of DNA from 25 case subjects at time T1 and the methylation status of DNA from the same 25 case subjects at time T2.

### DETAILED DESCRIPTION

[0021] Using a genome wide approach, this disclosure shows that, as compared to abstinent controls, alcohol use is associated with widespread changes in DNA methylation. This disclosure also shows that the changes in DNA methylation have a tendency to revert as a function of abstinence. Thus, DNA methylation can be used clinically to assess alcohol use status and/or to monitor alcohol treatment response.

### Methylation of Nucleic Acids and Determining the Methylation Status of Nucleic Acids

[0022] CpG islands are stretches of DNA in which the frequency of the CpG sequence is higher than other regions. The “p” in the term CpG designates the phosphodiester bond that binds the cysteine (“C”) nucleotide and the guanine (“G”) nucleotide. CpG islands are often located around promoters and are often involved in regulating the expression of a gene (e.g., housekeeping genes). Generally, CpG islands are not methylated when a sequence is expressed, and methylated to suppress expression (or “inactivate” the gene).

[0023] The methylation status of one or more CpG dinucleotides in genomic DNA or in a particular nucleic acid sequence (e.g., a CpG island) can be determined using any number of biological samples, such as blood, urine (e.g., cells from the bladder and/or urethra contained within the urine), saliva, or buccal cells. In certain embodiments, a particular cell type, e.g., lymphocytes, basophils, or monocytes, can be obtained (e.g., from a blood sample) and the DNA evaluated for its methylation status.

[0024] The methylation status of genomic DNA, of a CpG island, or of one or more specific CpG dinucleotides can be determined by the skilled artisan using any number of methods. The most common method for evaluating the methylation status of DNA begins with a bisulfite-based reaction on the DNA (see, for example, Frommer et al., 1992, PNAS USA, 89(5):1827-31). Commercial kits are available for bisulfite-modifying DNA. See, for example, EpiTect Bisulfite or EpiTect Plus Bisulfite Kits (Qiagen).

[0025] Following bisulfite modification, the nucleic acid can be amplified. Since treating DNA with bisulfite deaminates unmethylated cytosine nucleotides to uracil, and since uracil pairs with adenosine, thymidines are incorporated into DNA strands in positions of unmethylated cytosine nucleotides during subsequent PCR amplifications.

[0026] In some embodiments, the methylation status of DNA can be determined using one or more nucleic acid-based methods. For example, an amplification product of bisulfite-treated DNA can be cloned and directly sequenced using recombinant molecular biology techniques routine in the art. Software programs are available to assist in determining the original sequence, which includes the methylation status of one or more nucleotides, of a bisulfite-treated DNA (e.g., CpG Viewer (Carr et al., 2007, Nucl. Acids Res., 35: e79)). Also for example, amplification products of bisulfite-treated DNA can be hybridized with one or more oligonucleotides that, for example, are specific for the methylated, bisulfite-treated DNA sequence, or specific for the unmethylated, bisulfite-treated DNA sequence.

[0027] In some embodiments, the methylation status of DNA can be determined using a non-nucleic acid-based method. A representative non-nucleic acid-based method relies upon sequence-specific cleavage of bisulfite-treated DNA followed by mass spectrometry (e.g., MALDI-TOF MS) to determine the methylation ratio (methyl CpG/total CpG) (see, for example, Ehrich et al., 2005, PNAS USA, 102:15785-90). Such a method is commercially available (e.g., MassARRAY Quantitative Methylation Analysis (Sequenom, San Diego, Calif.)).

Nucleic Acid Sequences in which the Methylation Status is Associated with Alcohol Use

[0028] The methylation status of certain genomic DNA has been shown to be altered in individuals that use alcohol (relative to non-users). See, for example, Philibert et al. (2008, Am. J. Med. Genet. B Neuropsychiatr. Genet., 147B:565-70); Philibert et al. (2008, Am. J. Med. Genet. B Neuropsychiatr. Genet., 147B:543-9); Philibert et al. (2009, Psychiatr. Genet., 19:91-8); Philibert et al. (2012, Front Genet., 3:54); and also in U.S. Pat. No. 8,637,652, each of which are incorporated herein by reference in its entirety.

[0029] The present disclosure describes additional changes in the methylation status of one or more CpG islands and/or particular CpG dinucleotides that are correlated with alcohol use (e.g., heavy alcohol use). See, for example, Table II, which shows the top 30 probes that were most-significantly associated with changes in the methylation status of alcohol users compared to non-drinkers; and Table III, which show the top 30 differentially regulated gene pathways between alcohol users and non-drinkers. Any one or more of the CpG dinucleotides in which methylation status has been associated with alcohol use can be used in the methods herein to determine the predictive value (e.g., representing the likelihood of alcohol use). It would be understood that, particularly for determining alcohol use, the more CpG dinucleotides (i.e., CpG dinucleotides in which methylation status has been associated with alcohol use) are evaluated, the more accurate the predictive value will be.

[0030] In addition, it would be appreciated that the methylation status of one or more neighboring CpG dinucleotides can be in linkage disequilibrium with the methylation status of a CpG dinucleotide having significance with alcohol use (see, for example, Philibert et al., 2009, Am. J. Med. Genet. B. Neuropsychiatr. Genet., 153B:619-28) and, therefore, the methylation status of those neighboring CpG dinucleotides (e.g., about 200 nucleotides upstream and/or downstream of a CpG dinucleotide having significance with alcohol use (e.g., about 100 nucleotides upstream and/or downstream; about 50 nucleotides upstream and/or downstream; about 25 nucleotides upstream and/or downstream; about 20 nucleotides upstream and/or downstream; about 10 nucleotides upstream and/or downstream; or about 5 nucleotides upstream and/or downstream)) can be used in the methods described herein. Further, it would be appreciated that, in some instances, the greater (or more significant) the changes in the methylation status, the greater the alcohol use. See, for example, Philibert et al., 2012, Epigenetics, 7:1-8.

### Nucleic Acids and Methods Related Thereto

[0031] As used herein, nucleic acids can include DNA and RNA, and includes nucleic acids that contain one or more nucleotide analogs or backbone modifications. A nucleic acid can be single stranded or double stranded, which usually depends upon its intended use.

[0032] As used herein, an “isolated” nucleic acid molecule is a nucleic acid molecule that is free of sequences that naturally flank one or both ends of the nucleic acid in the genome of the organism from which the isolated nucleic acid molecule is derived (e.g., a cDNA or genomic DNA fragment produced by PCR or restriction endonuclease digestion). Such an isolated nucleic acid molecule is generally introduced into a vector (e.g., a cloning vector, or an expression vector) for convenience of manipulation or to generate a fusion nucleic acid molecule, discussed in more detail below. In addition, an isolated nucleic acid molecule can include an engineered nucleic acid molecule such as a recombinant or a synthetic nucleic acid molecule.

[0033] Nucleic acids can be isolated using techniques routine in the art. For example, nucleic acids can be isolated using any method including, without limitation, recombinant nucleic acid technology, and/or the polymerase chain reaction (PCR). General PCR techniques are described, for example in PCR Primer: A Laboratory Manual, Dieffenbach & Dveksler, Eds., Cold Spring Harbor Laboratory Press, 1995. Recombinant nucleic acid techniques include, for example, restriction enzyme digestion and ligation, which can be used to isolate a nucleic acid. Isolated nucleic acids also can be chemically synthesized, either as a single nucleic acid molecule or as a series of oligonucleotides.

[0034] A vector containing a nucleic acid (e.g., a nucleic acid that encodes a polypeptide) also is provided. Vectors, including expression vectors, are commercially available or can be produced by recombinant DNA techniques routine in the art. A vector containing a nucleic acid can have expression elements operably linked to such a nucleic acid, and further can include sequences such as those encoding a selectable marker (e.g., an antibiotic resistance gene). A vector containing a nucleic acid can encode a chimeric or fusion polypeptide (i.e., a polypeptide operatively linked to a heterologous polypeptide, which can be at either the N-terminus or C-terminus of the polypeptide). Representative heterologous polypeptides are those that can be used in purification of the encoded polypeptide (e.g., 6×His tag, glutathione S-transferase (GST))

[0035] Expression elements include nucleic acid sequences that direct and regulate expression of nucleic acid coding sequences. One example of an expression element is a promoter sequence. Expression elements also can include introns, enhancer sequences, response elements, or inducible elements that modulate expression of a nucleic acid. Expression elements can be of bacterial, yeast, insect, mammalian, or viral origin, and vectors can contain a combination of elements from different origins. As used herein, operably linked means that a promoter or other expression element(s) are positioned in a vector relative to a nucleic acid in such a way as to direct or regulate expression of the nucleic acid (e.g., in-frame). Many methods for introducing nucleic acids into host cells, both in vivo and in vitro, are well known to those skilled in the art and include, without limitation, electroporation, calcium phosphate precipitation, polyethylene glycol (PEG) transformation, heat shock, lipofection, microinjection, and viral-mediated nucleic acid transfer.

[0036] Vectors as described herein can be introduced into a host cell. As used herein, “host cell” refers to the particular cell into which the nucleic acid is introduced and also includes the progeny or potential progeny of such a cell. A host cell can be any prokaryotic or eukaryotic cell. For example, nucleic acids can be expressed in bacterial cells such as E. coli, or in insect cells, yeast or mammalian cells (such as Chinese hamster ovary cells (CHO) or COS cells). Other suitable host cells are known to those skilled in the art.

[0037] Oligonucleotides for amplification or hybridization can be designed using, for example, a computer program such as OLIGO (Molecular Biology Insights, Inc., Cascade, Colo.). Important features when designing oligonucleotides to be used as amplification primers include, but are not limited to, an appropriate size amplification product to facilitate detection (e.g., by electrophoresis), similar melting temperatures for the members of a pair of primers, and the length of each primer (i.e., the primers need to be long enough to anneal with sequence-specificity and to initiate synthesis but not so long that fidelity is reduced during oligonucleotide synthesis). Typically, oligonucleotide primers are 15 to 30 (e.g., 16, 18, 20, 21, 22, 23, 24, or 25) nucleotides in length. Designing oligonucleotides to be used as hybridization probes can be performed in a manner similar to the design of amplification primers. In some embodiments, hybridization probes can be designed to distinguish between to targets that contain different sequences (e.g., a polymorphism or mutation, e.g., the methylated vs. non-methylated sequence in the bisulfite-treated DNA).

[0038] Hybridization between nucleic acids is discussed in detail in Sambrook et al. (1989, Molecular Cloning: A Laboratory Manual, 2nd Ed., Cold Spring Harbor Laboratory Press, Cold Spring Harbor, N.Y.; Sections 7.37-7.57, 9.47-9.57, 11.7-11.8, and 11.45-11.57). Sambrook et al. discloses suitable Southern blot conditions for oligonucleotide probes less than about 100 nucleotides (Sections 11.45-11.46). The Tm between a sequence that is less than 100 nucleotides in length and a second sequence can be calculated using the formula provided in Section 11.46. Sambrook et al. additionally discloses Southern blot conditions for oligonucleotide probes greater than about 100 nucleotides (see Sections 9.47-9.54). The Tm between a sequence greater than 100 nucleotides in length and a second sequence can be calculated using the formula provided in Sections 9.50-9.51 of Sambrook et al.

[0039] The conditions under which membranes containing nucleic acids are prehybridized and hybridized, as well as the conditions under which membranes containing nucleic acids are washed to remove excess and non-specifically bound probe, can play a significant role in the stringency of the hybridization. Such hybridizations and washes can be performed, where appropriate, under moderate or high stringency conditions. For example, washing conditions can be made more stringent by decreasing the salt concentration in the wash solutions and/or by increasing the temperature at which the washes are performed. Simply by way of example, high stringency conditions typically include a wash of the membranes in 0.2×SSC at 65° C.

[0040] In addition, interpreting the amount of hybridization can be affected, for example, by the specific activity of the labeled oligonucleotide probe, by the number of probe-binding sites on the template nucleic acid to which the probe has hybridized, and by the amount of exposure of an autoradiograph or other detection medium. It will be readily appreciated by those of ordinary skill in the art that although any number of hybridization and washing conditions can be used to examine hybridization of a probe nucleic acid molecule to immobilized target nucleic acids, it is more important to examine hybridization of a probe to target nucleic acids under identical hybridization, washing, and exposure conditions. Preferably, the target nucleic acids are on the same membrane.

[0041] A nucleic acid molecule is deemed to hybridize to a nucleic acid but not to another nucleic acid if hybridization to a nucleic acid is at least 5-fold (e.g., at least 6-fold, 7-fold, 8-fold, 9-fold, 10-fold, 20-fold, 50-fold, or 100-fold) greater than hybridization to another nucleic acid. The amount of hybridization can be quantitated directly on a membrane or from an autoradiograph using, for example, a PhosphorImager or a Densitometer (Molecular Dynamics, Sunnyvale, Calif.).

[0042] A nucleic acid sequence, or a polypeptide sequence, can be compared to one or more related nucleic acid sequences or polypeptide sequences, respectively, using percent sequence identity. In calculating percent sequence identity, two sequences are aligned and the number of identical matches of nucleotides or amino acid residues between the two sequences is determined. The number of identical matches is divided by the length of the aligned region (i.e., the number of aligned nucleotides or amino acid residues) and multiplied by 100 to arrive at a percent sequence identity value. It will be appreciated that the length of the aligned region can be a portion of one or both sequences up to the full-length size of the shortest sequence. It also will be appreciated that a single sequence can align with more than one other sequence and hence, can have different percent sequence identity values over each aligned region.

[0043] The alignment of two or more sequences to determine percent sequence identity can be performed using the computer program ClustalW and default parameters, which allows alignments of nucleic acid or polypeptide sequences to be carried out across their entire length (global alignment). Chenna et al., 2003, Nucleic Acids Res., 31(13):3497-500. ClustalW calculates the best match between a query and one or more subject sequences, and aligns them so that identities, similarities and differences can be determined. Gaps of one or more residues can be inserted into a query sequence, a subject sequence, or both, to maximize sequence alignments. For fast pairwise alignment of nucleic acid sequences, the default parameters can be used (i.e., word size: 2; window size: 4; scoring method: percentage; number of top diagonals: 4; and gap penalty: 5); for an alignment of multiple nucleic acid sequences, the following parameters can be used: gap opening penalty: 10.0; gap extension penalty: 5.0; and weight transitions: yes. For fast pairwise alignment of polypeptide sequences, the following parameters can be used: word size: 1; window size: 5; scoring method: percentage; number of top diagonals: 5; and gap penalty: 3. For multiple alignment of polypeptide sequences, the following parameters can be used: weight matrix: blosum; gap opening penalty: 10.0; gap extension penalty: 0.05; hydrophilic gaps: on; hydrophilic residues: Gly, Pro, Ser, Asn, Asp, Gln, Glu, Arg, and Lys; and residue-specific gap penalties: on. ClustalW can be run, for example, at the Baylor College of Medicine Search Launcher website or at the European Bioinformatics Institute website on the World Wide Web.

[0044] Changes can be introduced into nucleic acid coding sequences using, for example, mutagenesis (e.g., site-directed mutagenesis, PCR-mediated mutagenesis) or by chemically synthesizing a nucleic acid molecule having such changes. Such nucleic acid changes can lead to conservative and/or non-conservative amino acid substitutions at one or more amino acid residues. A “conservative amino acid substitution” is one in which one amino acid residue is replaced with a different amino acid residue having a similar side chain (see, for example, Dayhoff et al. (1978, in Atlas of Protein Sequence and Structure, 5(Suppl. 3):345-352), which provides frequency tables for amino acid substitutions), and a non-conservative substitution is one in which an amino acid residue is replaced with an amino acid residue that does not have a similar side chain.

[0045] Nucleic acids can be detected using any number of amplification techniques (see, e.g., PCR Primer: A Laboratory Manual, 1995, Dieffenbach & Dveksler, Eds., Cold Spring Harbor Laboratory Press, Cold Spring Harbor, N.Y.; and U.S. Pat. Nos. 4,683,195; 4,683,202; 4,800,159; and 4,965,188) with an appropriate pair of oligonucleotides (e.g., primers). A number of modifications to the original PCR have been developed and can be used to detect a nucleic acid. Detection (e.g., of an amplification product, a hybridization complex, or a polypeptide) is usually accomplished using detectable labels. The term “label” is intended to encompass the use of direct labels as well as indirect labels. Detectable labels include enzymes, prosthetic groups, fluorescent materials, luminescent materials, bioluminescent materials, and radioactive materials.

### Articles of Manufacture or Kits

[0046] This disclosure also provides for articles of manufacture that can be used to determine the methylation status of one or more CpG dinucleotides and/or CpG islands. An article of manufacture as provided herein can include one or more oligonucleotides for determining the methylation status of one or more CpG dinucleotides and/or CpG islands, together with suitable packaging materials. The one or more oligonucleotides can detect the CpG dinucleotide in the bisulfite-treated DNA in the unmethylated state or in the methylated state.

[0047] Articles of manufacture may additionally include reagents (e.g., buffers, enzymes, co-factors) for carrying out the methods disclosed herein (e.g., bisulfite-treating DNA, amplification, sequencing, hybridization). Articles of manufacture provided herein also can contain a package insert or package label having instructions thereon for using the components within the article of manufacture to determine the methylation status of one or more CpG dinucleotides and/or one or more CpG islands in a biological sample.

[0048] In accordance with the present invention, there may be employed conventional molecular biology, microbiology, biochemical, and recombinant DNA techniques within the skill of the art. Such techniques are explained fully in the literature. The invention will be further described in the following examples, which do not limit the scope of the methods and compositions of matter described in the claims.

### EXAMPLES

### Example 1—Materials and Methods

[0049] All protocols and procedures used in this study were approved by the University of Iowa Institutional Review Board and full details are available from the inventors upon request. The case subjects described herein were recruited from the University of Iowa hospitals and clinics or two alcohol treatment centers in the State of Iowa. In brief, after admission to a hospital or alcohol treatment center and achievement of both sobriety and absence of significant cognitive impairment, potential subjects were approached by facility personnel as to their potential interest in participating in the current study. If interested, this information was relayed to the research team with the potential subjects then being contacted by a member of the research team who provided detailed information and screened the individuals for suitability for the study. Inclusion criteria included the ability to consent, an absence of significant active substance use disorders other than tobacco, an absence of medications hypothesized to affect DNA methylation, the absence of medical disorders including cancer, gastrointestinal disorders, diabetes, chronic obstructive pulmonary disease or severe cardiac disease, and in general, otherwise overall general good health. If not excluded and still willing to participate, subjects were consented and the study procedure initiated.

[0050] At the index intake (Time 1, or T1), which could occur up to seven days after admission, all case subjects were interviewed with a modified version of the Semi-Structured Assessment for the Genetics of Alcoholism, Version 2 (SSAGA-II; Bucholz et al., 1994, Stud. Alcohol, 55:149-58), which included specific items to assess use of substances over the past six months. In addition, subjects were phlebotomized to provide biomaterial for the current study. Then, approximately 4 weeks later (Time 2, or T2), the same subjects were once again interviewed to assess for changes in medical status and phlebotomized.

[0051] Control subjects were recruited from the Iowa City region. Inclusion criteria for the study were similar to those of the case subjects and included good overall general health, a complete abstinence from alcohol for at least six months, an absence of medications hypothesized to influence DNA methylation, and an absence of significant substance use other than tobacco. All control subjects were interviewed with the same instruments as the case subjects and phlebotomized to provide biomaterial for the current study.

[0052] Sera and mononuclear cell (i.e. lymphocyte) pellets were prepared as previously described (Philibert et al., 2012, Epigenetics, 7:1331-8). As part of an effort to assess self-report reliability, cotinine and tetrahydrocannabinol levels were assessed in sera using an enzyme linked immunoassay (ELISA) kits supplied by Abnova (Taiwan) according to manufacturer's directions and previous protocols (Philibert et al., 2013, Epigenetics, 5:19-26). DNA was prepared from the lymphocyte cell pellets using a QiaAmp kit (Qiagen, Germany) according to manufacturer's directions.

[0053] Genome wide DNA methylation was assessed using the Illumina (San Diego, Calif.) HumanMethylation450 Beadchip by the University of Minnesota Genome Center (Minneapolis, Minn.) using the protocol specified by the manufacturer as previously described (Monick et al., 2012, Am. J. Med. Genet., Part B Neuropsychiatric Genet., 159:141-51). This chip contains 485,577 probes recognizing at least 20216 transcripts, potential transcripts or CpG islands (from the Genome Reference Consortium human genome build 37 (GRCh37)).

[0054] The resulting data were inspected for complete bisulfite conversion and average beta values were determined for each targeted CpG residue determined using the Illumina Genome Studio Methylation Module, Version 3.2. The resulting data were then cleaned using a PERL-based algorithm to remove those beta values whose detection p-values, an index of the likelihood that the observed sequence represents random noise, were greater than 0.05. Then, data from arrays with <99.5% complete assessment success were removed.

[0055] The surviving data was imported into MethLAB (Kilaru et al., 2012, Epigenetics, 7:225-9) and analyzed with respect to alcohol use status using standard general linear models approach controlling for chip and batch variables. The resulting p-values were corrected for genome wide comparisons using either False Discovery Rate or Bonferroni correction methods (Benjamini et al., 1995, J. Royal Stat. Soc. Series B, Method., 57:289-300).

[0056] Essentially, a genome wide linear regression was used; in this case, a t-test that accounts for batch and slide co-variates. “Batch” is a term in DNA methylation that refers to the grouping with respect to bisulfite conversion (e.g., “batch” takes into account the degree of bisulfite conversion or lack thereof). “Slide” refers to the individual chip(s) or array(s) on which the hybridizations are performed, since, for example, there can be slide to slide variation with respect to the degree of hybridization of the same sample. It would be understood that accounting for batch and slide variation usually results in a greater degree of significance.

### Example 2—Experimental Results

[0057] The clinical and demographic characteristics of the case and control subjects included in the study are described in Table 1. In brief, in keeping with the population of Iowa and overall referral characteristics of patients referred for alcohol treatment, the subjects tended to be in their 40's and were primarily white males. The case subjects were extremely heavy alcohol users, with the typical subject describing the average consumption of a fifth of vodka or 12 pack of beer for at least the past week prior to admission. The delay between the time of phlebotomy and their last drink averaged four days and varied between one and eight days. Not surprisingly, the case subjects were enriched for tobacco use disorders, with 85% of them being daily smokers. They also tended to have a higher rate of THC use, with 10 subjects having either marginal or markedly positive hydroxy-THC levels. In each and every case, the results of the serum cotinine and THC ELISA tests were consistent with self-report data. Of the 41 case Time 1 (T1) subjects ascertained during the time period leading up to this study, only 26 completed the Time 2 (T2) assessments. The reasons for the failure varied. In some cases, the subject had already left treatment and had begun to drink, while in other cases, the subject had already left treatment and was either unavailable or unwilling to complete the second stage of assessment.

TABLE I
Clinical and demographic characteristics of study subjects

| | Case | Control |
|---|---|---|
| | Subjects | Subjects |
| N= | 33 | 33 |
| Age | 45.5 7.8 | 46.7 7.8 |
| Ethnicity | | |
| White | 30 | 31 |
| African American | 2 | 1 |
| Hispanic | 0 | 1 |
| Gender | | |
| Male | 25 | 25 |
| Female | 8 | 8 |
| Days since last drink | 4.0 1.8 | |
| Average daily drink consumption | | |
| prior to admission by self report | | |
| Past week | | 0 |
| Past month | | 0 |
| Past 6 months | | 0 |
| Smoking Status | | |
| Current daily | 27 | 1 |
| Positive cotinine | 28 | 1 |
| Cannabis Use Status | | |
| Use in past year by self report | 11 | 0 |
| Positive hydroxyl-THC | 9 | 1 |

[0058] In contrast, though similar in age, gender and ethnicity, the 33 control subjects had lower rates of both tobacco and cannabis use. In fact, only one of the control subjects was a current daily smoker and all control subjects denied cannabis use in the past year. In contrast to the results from the case subjects, one discrepancy in the serum ELISA testing was observed (i.e., there was one positive test for THC).

[0059] Genome wide methylation data was successfully obtained (measurements for >99.5% of all probes) for 95 samples, including two lymphoblast DNA standards and one internal replicate. This included 33 controls, 33 case subjects at T1 and 26 case subjects at T2. The correlation between the internal replicate was greater than 0.998. The average beta value for the controls, and the subjects at T1 and T2 was 0.4788, 0.4800 and 0.4833, respectively.

[0060] The results from these experiments and the CpG residues, regions and gene claimed in this application are given in Appendix A. The data contained in Appendix A provides the Illumina probe ID, the sequences of which are publicly available, and the identity of the CpG in question denoted by sequence information and mapping information. Finally, the p-value for the t-test comparing methylation of the alcoholic subjects to that for the controls is provided. A p<0.05 is considered significant, and complete annotation files for the probes listed in Appendix A are publically available.

[0061] Specifically, Column A, “Probe Name”: the Illumina designation for the probe. Column B, “Target Region”: the genomic sequence of the region; the center of the region, the CpG residue, is denoted by brackets (e.g. [CG]). Column C, “CHR”: the chromosome on which the target region is found. Column D, “Map Info”: the base pair at which the CpG residue is found in the GRCH37 assembly; note that the since the cytosine and guanine nucleotides are complementary, the CpG residue is found on both the sense and anti-sense strand. Column E, “UCSC Ref Gene Name”: the generally accepted gene names, when present, in which the CpG residue is found. Column F, “p-value”: the significance of the t-test comparing methylation of the alcoholic cases to that of the controls.

[0062] The list of the 30 most significant results from the comparison of the methylation status of the DNA from the 32 T1 subjects and the 33 healthy abstinent controls are listed in Table II. Overall, after genome wide correction using false discovery rate (FDR) method, a total of 8636 probes were differentially methylated while, when using more conservative Bonferroni correction, only 56 comparisons were statistically significant. Examination of the QQ plot for the comparison reveals the basis for these observed differences is significant with positive skewing (greater numbers of more significant p values) being markedly prominent (FIG. 1).

TABLE II
The 30 Most Significantly Associated Probes in Case and Control Analysis

| | | | | Average Beta | | | |
|---|---|---|---|---|---|---|---|
| | | | | Values | | | Corrected |
| Probe ID | GENE | Placement | Island Status | Case | Control | T-test | P-value |
| cg23193759 | C10orf35 | TSS200 | Island | 0.128 | 0.168 | 4.66E−12 | 2.26E−06 |
| cg02583484 | HNRNPA1 | Body | S Shelf | 0.250 | 0.319 | 1.42E−11 | 3.46E−06 |
| cg23779890 | GDAP1 | TSS200 | Island | 0.194 | 0.243 | 1.30E−10 | 2.10E−05 |
| cg13415831 | | | | 0.073 | 0.098 | 3.18E−10 | 3.87E−05 |
| cg09935388 | GFI1 | Body | Island | 0.647 | 0.799 | 1.35E−09 | 0.0001 |
| cg01432120 | | | Island | 0.660 | 0.720 | 1.86E−09 | 0.0002 |
| cg12655542 | | | | 0.225 | 0.282 | 2.18E−09 | 0.0002 |
| cg11832281 | CUGBP2 | Body | S Shelf | 0.070 | 0.097 | 4.20E−09 | 0.0003 |
| cg06126421 | | | | 0.643 | 0.750 | 5.34E−09 | 0.0003 |
| cg12895631 | C11orf75 | 5′UTR | | 0.161 | 0.192 | 7.07E−09 | 0.0003 |
| cg25998745 | | | | 0.588 | 0.666 | 8.43E−09 | 0.0003 |
| cg08352774 | TMEM181 | Body | S Shelf | 0.110 | 0.149 | 8.46E−09 | 0.0003 |
| cg19939077 | PPIF | Body | S Shore | 0.147 | 0.184 | 8.85E−09 | 0.0003 |
| cg13126206 | | | S Shelf | 0.468 | 0.521 | 1.11E−08 | 0.0004 |
| cg22888484 | SNHG11 | TSS200 | N Shore | 0.043 | 0.056 | 1.21E−08 | 0.0004 |
| cg00159243 | SELPLG | 5′UTR | | 0.397 | 0.474 | 1.76E−08 | 0.0005 |
| cg24046474 | RPL12 | Body | N Shore | 0.221 | 0.296 | 1.89E−08 | 0.0005 |
| cg00957665 | TRIM8 | Body | S Shore | 0.097 | 0.125 | 1.93E−08 | 0.0005 |
| cg06093152 | | | | 0.572 | 0.654 | 2.03E−08 | 0.0005 |
| cg12126344 | | | | 0.795 | 0.835 | 2.13E−08 | 0.0005 |
| cg17485265 | FAM50B | TSS1500 | N Shore | 0.677 | 0.744 | 2.29E−08 | 0.0005 |
| cg16854826 | ZMIZ1 | 5′UTR | | 0.603 | 0.654 | 2.42E−08 | 0.0005 |
| cg23028436 | STK38L | TSS200 | Island | 0.064 | 0.094 | 2.89E−08 | 0.0006 |
| cg00690082 | STAT5A | TSS1500 | N Shore | 0.309 | 0.376 | 3.00E−08 | 0.0006 |
| cg06285727 | ATG16L2 | TSS1500 | N Shore | 0.152 | 0.216 | 3.68E−08 | 0.0007 |
| cg09267773 | | | N Shore | 0.517 | 0.433 | 4.00E−08 | 0.0007 |
| cg21475150 | RPL31 | TSS1500 | Island | 0.794 | 0.849 | 4.30E−08 | 0.0007 |
| cg21416692 | PHC2 | 5′UTR | | 0.742 | 0.792 | 4.41E−08 | 0.0007 |
| cg02348119 | TBC1D16 | 5′UTR | | 0.598 | 0.647 | 4.48E−08 | 0.0007 |
| cg10691866 | TPST1 | Body | | 0.419 | 0.491 | 4.55E−08 | 0.0007 |

All average methylation values are non-log transformed beta-values. Island status refers to the position of the probe relative to the island. Classes include: 1) Island, 2) north (N) shore, 3) south (S) shore, 4) north (N) shelf, 5) south (S) shelf and 6) blank denoting that the probe does not map to an island.

[0063] A frequent concern in high-risk cohorts such as these case subjects is the effect of co-morbid substances. In particular, this is a concern for the current results because smoking has profound effects on DNA methylation (see, for example, Dogan et al., 2014, BMC Genomics, 15:151), and 27 of the 33 case subjects were active smokers. In this regard, cg05575921, which has been shown to correlate strongly with tobacco use (see, for example, Dogan et al., 2014, BMC Genomics, 15:151), was the 31^{st} ranked probe. However, overall, there was no significant overlap between the signal for alcohol consumption and the signal for smoking. Only 22 of the 910 probes that attained genome wide significance with respect to smoking in Dogan et al. (2014, BMC Genomics, 15:151) were ranked among the top 10,000 most highly associated probes in the current study. Conversely, the overall rank of the 10,000 most highly associated probes with respect to smoking in Dogan et al. was 302,264 (of 485,577), with the median of the distribution being 318,258^{th}. Hence, there appears to be little overlap in the methylation signatures between subjects that use alcohol and subjects that use tobacco.

[0064] As the next step of the analyses, the differential distribution of the 1000 most significantly associated probes were analyzed using the GoMiner™ algorithm (Zeeberg et al., 2003, Genome Biol., 4:R28). The results, shown in Table III, demonstrated a marked enrichment of the most highly associated probes for pathways involved in programmed cell death (apoptosis) or GTPase signaling.

[0065] Whereas the primary goal of many biomarker studies is to determine whether a given marker can be used to differentiate pathological states from control states, a secondary goal of the present study was to determine whether DNA methylation could be used to monitor alcohol abstinence. As a first step in that assessment, the genome wide DNA methylation patterns of 25 subjects for whom we successfully obtained both T1 and T2 data were compared. The average length of time between the T1 and T2 draws for these 25 individuals was 25 days. No single probe crossed the threshold of genome-wide significance with the best observed uncorrected p-value being only 5×10⁻⁶ with QQ plots of the analysis demonstrating significant negative skewing was prominent (FIG. 2).

TABLE III
The Top 30 Most Differentially Regulated Gene Ontology Pathways

| GO | | Genes | | Log10 | |
|---|---|---|---|---|---|
| Category | Category Name | Total | Changed | P-Value | FDR |
| GO:0005515 | protein binding | 6815 | 286 | −7.37 | 0 |
| GO:0005737 | cytoplasm | 7845 | 312 | −5.75 | 0 |
| GO:0008219 | cell death | 1392 | 78 | −5.69 | 0 |
| GO:0016265 | death | 1395 | 78 | −5.66 | 0 |
| GO:0005829 | cytosol | 1884 | 98 | −5.63 | 0 |
| GO:0012501 | programmed cell death | 1278 | 72 | −5.36 | 0 |
| GO:0007264 | small GTPase mediated signal | 566 | 40 | −5.33 | 0 |
| | transduction | | | | |
| GO:0043067 | regulation of programmed cell | 981 | 59 | −5.30 | 0 |
| | death | | | | |
| GO:0010941 | regulation of cell death | 989 | 59 | −5.20 | 0 |
| GO:0006915 | apoptosis | 1271 | 71 | −5.16 | 0 |
| GO:0042981 | regulation of apoptosis | 974 | 57 | −4.79 | 0 |
| GO:0023033 | signaling pathway | 2812 | 130 | −4.73 | 0 |
| GO:0019899 | enzyme binding | 671 | 43 | −4.63 | 0 |
| GO:0048523 | negative regulation of cellular | 2069 | 101 | −4.61 | 0 |
| | process | | | | |
| GO:0002376 | immune system process | 1256 | 68 | −4.52 | 0 |
| GO:0023034 | intracellular signaling pathway | 1707 | 86 | −4.44 | 0.01 |
| GO:0023052 | signaling | 3787 | 164 | −4.36 | 0.01 |
| GO:0065007 | biological regulation | 7226 | 283 | −4.33 | 0.01 |
| GO:0048519 | negative regulation of biological | 2235 | 106 | −4.31 | 0.01 |
| | process | | | | |
| GO:0035556 | intracellular signal transduction | 1454 | 75 | −4.24 | 0.01 |
| GO:0005622 | intracellular | 11231 | 411 | −4.22 | 0.01 |
| GO:0060548 | negative regulation of cell death | 441 | 31 | −4.21 | 0.01 |
| GO:0044464 | cell part | 14663 | 511 | −4.14 | 0.02 |
| GO:0005623 | cell | 14664 | 511 | −4.13 | 0.01 |
| GO:0035466 | regulation of signaling pathway | 1158 | 62 | −4.02 | 0.02 |
| GO:0009987 | cellular process | 11702 | 424 | −3.98 | 0.02 |
| GO:0043069 | negative regulation of cell death | 434 | 30 | −3.96 | 0.02 |
| GO:0007265 | Ras protein signal transduction | 335 | 25 | −3.91 | 0.02 |
| GO:0051056 | regulation of GTPase signal | 339 | 25 | −3.83 | 0.03 |
| | transduction | | | | |
| GO:0050794 | regulation of cellular process | 6319 | 249 | −3.81 | 0.03 |

FDR = false discovery rate.

[0066] Secondary analysis of the T1 and T2 proved highly interesting. Since exposure to ethanol is stressful to cells, and biological systems tend to revert to their homeostatic means after perturbation, we next asked which methylation assessment for the ethanol-imbibing subjects, T1 or T2, was more similar to that of the controls for the 8636 FDR-significant probes identified. Remarkably, the average methylation of these CpG residues for all 25 subjects was more similar to the control subjects at the T2 draw time than it was at the T1 draw time at 7360 of 8636 probes (Chi Square p<0.0001) including all 30 of those listed in Table II. Unfortunately, the average version to the mean of the controls was rather modest at each locus, with the overall change in the beta value being approximately 0.005 (i.e. 0.5%).

### Example 3—Summary

[0067] The experiments herein demonstrate that alcohol use is associated with significant and widespread changes in DNA methylation as compared to controls that do not use alcohol. The experiments herein also demonstrate that the degree of the changes in methylation tends to diminish after approximately one month of abstinence. Thus, the DNA methylation signature can be used to infer recent alcohol use status. The results reported herein likely will impact the choice of settings in which alcohol treatment is conducted and monitored.

[0068] As would be expected with alcohol use, the magnitude of the changes in DNA methylation due to alcohol use are not as strong as those observed with, for example, tobacco use. In contrast to that of smoking, for example, where the differences of methylation at cg05575921 between chronic smokers (˜60%) and non-smokers (92%) can exceed 30%, the average differences at any one point in the current alcohol use study tend to be around 5% to 10%.

[0069] It is to be understood that, while the methods and compositions of matter have been described herein in conjunction with a number of different aspects, the foregoing description of the various aspects is intended to illustrate and not limit the scope of the methods and compositions of matter. Other aspects, advantages, and modifications are within the scope of the following claims.

[0070] Disclosed are methods and compositions that can be used for, can be used in conjunction with, can be used in preparation for, or are products of the disclosed methods and compositions. These and other materials are disclosed herein, and it is understood that combinations, subsets, interactions, groups, etc. of these methods and compositions are disclosed. That is, while specific reference to each various individual and collective combinations and permutations of these compositions and methods may not be explicitly disclosed, each is specifically contemplated and described herein. For example, if a particular composition of matter or a particular method is disclosed and discussed and a number of compositions or methods are discussed, each and every combination and permutation of the compositions and the methods are specifically contemplated unless specifically indicated to the contrary. Likewise, any subset or combination of these is also specifically contemplated and disclosed.

Lengthy table referenced here
US20170306405A1-20171026-T00001
Please refer to the end of the specification for access instructions.

LENGTHY TABLES
The patent application contains a lengthy table section. A copy of the table is available in electronic form from the USPTO web site (http://seqdata.uspto.gov/?pageRequest=docDetail&DocID=US20170306405A1). An electronic copy of the table will also be available from the USPTO upon request and payment of the fee set forth in 37 CFR 1.19(b)(3).

The application's sequence listing, which the Patent Office published only in electronic form, follows.

SEQUENCE LISTING (10001 sequences)

SEQ ID NO: 1 - DNA, 72 bp, Homo sapiens
cacgccccatctccccgacccccagcaccccgcgccgcccccaaccctgggccgggcaggtgcaattcctca

SEQ ID NO: 2 - DNA, 72 bp, Homo sapiens
gacagctataacaacggaggcggaggcggctttggcggtggtagtggtaggtatccagtgatccaagtactt

SEQ ID NO: 3 - DNA, 72 bp, Homo sapiens
aggtgcactcccaggcttgccaggggctttccagtcgcagaccccgcgtgttcgcagactctgccgccggcg

SEQ ID NO: 4 - DNA, 72 bp, Homo sapiens
caagtgcaggccagcaagctttcacaggatggtcacgcaaggaaaggaagaaagtctgcagcctatggatga

SEQ ID NO: 5 - DNA, 72 bp, Homo sapiens
tgtacccggagtttcgttcggaggggttcggggcgcgcccaatccttgtctggccacttgacgccctggcag

SEQ ID NO: 6 - DNA, 72 bp, Homo sapiens
ccgggcgccttcaggccgggtctgctgcgatgcggcgccatccgcgtccggctcctggggcctgcagacctt

SEQ ID NO: 7 - DNA, 72 bp, Homo sapiens
aaagaaacttagtagagaaacattttagaattacccggctgtgttgcatgaccatttgaggtttgtggttat

SEQ ID NO: 8 - DNA, 72 bp, Homo sapiens
taaatttaatttctggctctactgcttctttgctacgggccttgggcatgttacttaatcacatcttaaagt

SEQ ID NO: 9 - DNA, 72 bp, Homo sapiens
tgtttctcctcctctgaaaccccatgattcagcagcgtctcccatgtgtgctcaaaagttggacgtgcctcc

SEQ ID NO: 10 - DNA, 72 bp, Homo sapiens
tcagatgccaggcactgtgctaaagccactaaactcgagctaactcatctaactgtcataatacctgaggta

SEQ ID NO: 11 - DNA, 72 bp, Homo sapiens
acaggccattagcggtccccaccgacagctctctccgtgggcaaggatgaagccttgtttgcacaagaagtg

SEQ ID NO: 12 - DNA, 72 bp, Homo sapiens
caggaagtggggagccaggctgtcaggcaacaggccggcattttgggccaaaggagaagagattatttttat

SEQ ID NO: 13 - DNA, 72 bp, Homo sapiens
ccggccacctggtggaccccagaatgcccctcctgcgagtcgggacacactcagagacagtgtgcccggcgc

SEQ ID NO: 14 - DNA, 72 bp, Homo sapiens
ggccctccctgtgctacagcctggagcctgtcaggcggtgagctgaagccacgactgcactcacctcatggg

SEQ ID NO: 15 - DNA, 72 bp, Homo sapiens
gagtgaactcatgaagggatgctccattagatgaacgcttggataaagggcgttagtggagggacagaattg

SEQ ID NO: 16 - DNA, 72 bp, Homo sapiens
ccatcacactgattagcaagcaaggcccggagcggcgggatcactcccaggccccaccttccacctctcctc

SEQ ID NO: 17 - DNA, 72 bp, Homo sapiens
aatgaaattcagagaaatccaagaggacagaatgacggggaagccagcagttgctcagcaggcatgagacac

SEQ ID NO: 18 - DNA, 72 bp, Homo sapiens
agcaaatacgatttgctgtataattagtttccaatcggatggactagccctgggtttgtgtgccaggatagg

SEQ ID NO: 19 - DNA, 72 bp, Homo sapiens
gaaatgatgcaagttccgtgtcagctctcagaggccgtgaaacacctgggcaatcagcaagggtgtgatgtc

SEQ ID NO: 20 - DNA, 72 bp, Homo sapiens
cctttgtttgtgttttggtgtggtgattgttttcccggtcatgaggcagagggatcatttcagtatcacagg

SEQ ID NO: 21 - DNA, 72 bp, Homo sapiens
gtaaggttatgctcacaggcattgttgctcttaggcgggaggaggctgaaccgcagtatgtatttcacaacc

SEQ ID NO: 22 - DNA, 72 bp, Homo sapiens
caggaaacctcttccttgaaagagggagggcagagcgagcccctgcccccagccctggcctgagcagttggg

SEQ ID NO: 23 - DNA, 72 bp, Homo sapiens
tcaactccctcaaaaccagtctggccttcaccaggcggagatgggtggggccgggaagacgggcgttgacga

SEQ ID NO: 24 - DNA, 72 bp, Homo sapiens
ttaggacctaggactacccacactaaagccaagcccggcccaaccaagacagatgtttggtgggtggggctg

SEQ ID NO: 25 - DNA, 72 bp, Homo sapiens
ccgcacagattacaggatggtgtgataactggtgacggttataactcgaactcaactggggctggtgtctga

SEQ ID NO: 26 - DNA, 72 bp, Homo sapiens
ggatgggtggagtcgaaaacctctcccttgctgggcgatactgtcttgtgttgacgttcaaaaatatctcct

SEQ ID NO: 27 - DNA, 72 bp, Homo sapiens
tctctcaggtcatatccaacacactgggccacccacgcacagggacgacgcgacagccctgtggctccaccg

SEQ ID NO: 28 - DNA, 72 bp, Homo sapiens
ttgaggtcagagtctgtcttcatgccagatacattcgtgagcagatatggtcaccagctcaaaggctacaga

SEQ ID NO: 29 - DNA, 72 bp, Homo sapiens
ccctcttgtctccttttgaaagccctcattccacgcgtatgagcttcctacggctgctgtgacaaatgacac

SEQ ID NO: 30 - DNA, 72 bp, Homo sapiens
agccctctcctagccagcccacatttgtgagcactcggtaaacacagagcaggagggaattacagtgaatgg

SEQ ID NO: 31 - DNA, 72 bp, Homo sapiens
agccctgccccgcggccctggccctgccctgcacccggctgggtctcatctgacacgcagccttccagcctc

SEQ ID NO: 32 - DNA, 72 bp, Homo sapiens
ctgtttgatagtttactgtgtctgatttcttcccccgtactttttcaactagtctctagtgatccctgaaaa

SEQ ID NO: 33 - DNA, 72 bp, Homo sapiens
ctgtgaacatggagaactttttgagaatgttgaggcggcagcctgaaagcaagcaggagattgtttgctttg

SEQ ID NO: 34 - DNA, 72 bp, Homo sapiens
ccctacttgatgtggacagtgtctcccattcactacgtaacacacatggagaagctgaggttcacagatagc

SEQ ID NO: 35 - DNA, 72 bp, Homo sapiens
agggctaatatttgaaaccacgggagcaggaattgcgaggctgactcaagtcataaggcacctgacggttaa

SEQ ID NO: 36 - DNA, 72 bp, Homo sapiens
gagagggccatctgcctgggtgccgagaactgcagcgtccgcggtgcgaggcgcggcccgtcccgtcccggc

SEQ ID NO: 37 - DNA, 72 bp, Homo sapiens
cacgtagggggccttcattgcatctctcttcccttcgcctttcttgtccacgacctgtcctagccaaggcca

SEQ ID NO: 38 - DNA, 72 bp, Homo sapiens
gggcaggctgggcatggcccgcgaggcagggtagccggcttggagcgcggggtccgggaggcaggcgcgggg

SEQ ID NO: 39 - DNA, 72 bp, Homo sapiens
tgatggttttatctcgagatccagagacaatctgccggttgtcagaggagaaggccacactcagcacatcct

SEQ ID NO: 40 - DNA, 72 bp, Homo sapiens
accctagatttgggacattcattcgccaccagtaccgggcggtgtatggcctgagatttgggggggcttgtg

SEQ ID NO: 41 - DNA, 72 bp, Homo sapiens
agggagccaaggaaggcaaagagaagcaggagccccgccacacacattgcaagtggtggattgctggctgtg

SEQ ID NO: 42 - DNA, 72 bp, Homo sapiens
gtcttgcctgatcatttcctggatgctctgaggttcggtcttgtagggagaagggagtaaacaggaatgacc

SEQ ID NO: 43 - DNA, 72 bp, Homo sapiens
gataccaggtaaccagaataaagctactttgtaaccgttacctctaacattacaatagctaaatgttgatag

SEQ ID NO: 44 - DNA, 72 bp, Homo sapiens
gcagggttccagcgcggcagcccaggtcctggtggcgctgctccttgagagaagcctgggcggcagaaaggc

SEQ ID NO: 45 - DNA, 72 bp, Homo sapiens
tccagaaaagctgttcttgtctgccaccttctcaccgtcactgggttttttaccattctaatatttgtcatt

SEQ ID NO: 46 - DNA, 72 bp, Homo sapiens
tagccaagaacgatgaggtttcaggttggttctaccgattggtgaactaaatttaacaggccaattttttta

SEQ ID NO: 47 - DNA, 72 bp, Homo sapiens
acgggctgccagaacccaagaggggaggatgaaagcgaaggtgacacaggatgtggcttggcagagaggcgt

SEQ ID NO: 48 - DNA, 72 bp, Homo sapiens
aatgagaccatcaaaccaagagcagagcggcaaaccgcatgcacaaatatgaagtaatatctttctactctg

SEQ ID NO: 49 - DNA, 72 bp, Homo sapiens
ctctgggtagagtccacccacttcacccagtataacgccctctacttcctgcacacctgggggaaaggggtg

SEQ ID NO: 50 - DNA, 72 bp, Homo sapiens
ctgctgagaaagaggcgctaaggtggccctggagccgtgaattcactgggattgagatcatctcggcgactt

SEQ ID NO: 51 - DNA, 72 bp, Homo sapiens
cccttatagtatttgaattattttggacaagagaacggaagggttttccggcagatataacattgcgtgctt

SEQ ID NO: 52 - DNA, 72 bp, Homo sapiens
accaacctttccccttggccccagcagtgcgttggcgtgtccctggggctggtcccagtgcccgcctggaaa

SEQ ID NO: 53 - DNA, 72 bp, Homo sapiens
gccctggggcagggctatatggacaggaaacacaacggtgaggaagggctttcagaatccacatccttcagt

SEQ ID NO: 54 - DNA, 72 bp, Homo sapiens
aaattcagagctcaagttgatgcccctggctcttgcgtcactccagctgtggcctgcttacagctctctgaa

SEQ ID NO: 55 - DNA, 72 bp, Homo sapiens
tgtcagatccagcctccccacctctgctgagctggcggctggactcaaggcctgccacgtcttcctgctctg

SEQ ID NO: 56 - DNA, 72 bp, Homo sapiens
ttgggcaattttctacaaacctcagtttctgcacccgtaaagtagcaacggttgttctgaggacggaatgag

SEQ ID NO: 57 - DNA, 72 bp, Homo sapiens
ataaattgccacacccactgtcttctgcccactggcggcaaatcctttgtgttctcataggtcaaaagagga

SEQ ID NO: 58 - DNA, 72 bp, Homo sapiens
ccgttgaaaaaggacagcccaggctctgtaaccttcggtagcctccagatctcacagtccccacccctcccc

SEQ ID NO: 59 - DNA, 72 bp, Homo sapiens
cgaggtgaagaaatccttcctggggcccttgtccccgtcctgtaagatggtgcagatgatgaggcagtttct

SEQ ID NO: 60 - DNA, 72 bp, Homo sapiens
tatatatcctgtgcaggcaggggacaggctgacaacgggctaatcttgcttccgtctcagagggagaagaat

SEQ ID NO: 61 - DNA, 72 bp, Homo sapiens
ggcaatgagggtgggggttgtggccctgcctgtcacggtccccagcagtgcagatgaattagaccattgagc

SEQ ID NO: 62 - DNA, 72 bp, Homo sapiens
gtggacggcaggccgttctgcaggctgcagcgcgccgggggcttgtagggctgagcgcatgctcctctgggt

SEQ ID NO: 63 - DNA, 72 bp, Homo sapiens
tcctaaataacctcttccagatccagcagctcccccgcctcctccccaggctccttctgaggcgggacagaa

SEQ ID NO: 64 - DNA, 72 bp, Homo sapiens
gccaggggcctcaccagtcttccctgatccactctcgcctgtgatgaggatacactggtctcggtccctgtc

SEQ ID NO: 65 - DNA, 72 bp, Homo sapiens
aaagctctaaatcaacccagctctgcaacccagctcgcttagcttacccttcagatgttccagtagtaggac

SEQ ID NO: 66 - DNA, 72 bp, Homo sapiens
ggaccctggcctactttgagccatatatgtcctggcgagatgcagcaacttcctagggccacccagctttgc

SEQ ID NO: 67 - DNA, 72 bp, Homo sapiens
tgtgcgagctgtcctgctccaccgactaccggatgcgctgaggcccggctctcccgccctgcacgagcccag

SEQ ID NO: 68 - DNA, 72 bp, Homo sapiens
catttcctttgcaatgagtggtaactggaggcgggcggtgcatggacctgccttgcaaggcttctctgttag

SEQ ID NO: 69 - DNA, 72 bp, Homo sapiens
ggtacttaataacttgatggagttgaagatgatgacggtgacaatgacgtcaaccaggacaggaaactggag

SEQ ID NO: 70 - DNA, 72 bp, Homo sapiens
gctcccccgagccacccagctcagggatgttcctgcgcagggcgaggtagacggttccatttggagctggga

SEQ ID NO: 71 - DNA, 72 bp, Homo sapiens
aaattctcacaaattatgaggccaacacttagaatcgggaagaaagtgatgaaaccatttgtgaaactccct

SEQ ID NO: 72 - DNA, 72 bp, Homo sapiens
gcagcccccaccgccacaggcccagtctgcgcccccgcagccaacagcccaagtgcaagtgcagacctcgca

SEQ ID NO: 73 - DNA, 72 bp, Homo sapiens
actgacagaggcactagaagcttcactgaaggacccgcatgtcagttctgatggaaacacctggtgtttaca

SEQ ID NO: 74 - DNA, 72 bp, Homo sapiens
agcatagctctgccccggctacatcaggagctatccgagaacagaaatcggttgagcttctcctgtcccctt

SEQ ID NO: 75 - DNA, 72 bp, Homo sapiens
ggcagtgagcaaagcagagagtggttgcatgtgtacggtgtaggagaagtaaaaagaggtcagatcagacca

SEQ ID NO: 76 - DNA, 72 bp, Homo sapiens
tatgtctccagcaccaagagtgtcagggtagacgacggtgtggagctcagtggaggcggataagggggctgt

SEQ ID NO: 77 - DNA, 72 bp, Homo sapiens
tagaaaacacgcatgcacaatggcaagaggctgcacgccactgagaaaagatgaaatccggccctgctgggg

SEQ ID NO: 78 - DNA, 72 bp, Homo sapiens
aactctgtaagctgtgtcagccatgcaaggcaccacgctcggctaatttttgtatttttagaagagacgggg

SEQ ID NO: 79 - DNA, 72 bp, Homo sapiens
atgaaagggctggccaggccgcgtgcggtggctcacgcctgtaatcccagcactttgggaggccaagtgatc

SEQ ID NO: 80 - DNA, 72 bp, Homo sapiens
cttctcaacagcatgacctgaccacgcagtgcccacgacagaggagacctgcttcctctccaggttctgtgg

SEQ ID NO: 81 - DNA, 72 bp, Homo sapiens
gttgaggctcacacattgaggcaaggcactaccaccgcccggtgctcttgcagctctgtcacggagcaccct

SEQ ID NO: 82 - DNA, 72 bp, Homo sapiens
gaattgctttgagaaactccactcaaccataaagacgggtttaacttttctagagcggtgacattggagaaa

SEQ ID NO: 83 - DNA, 72 bp, Homo sapiens
aaatcagtagtgaaggcccccccctccaagctgtacgcaagttggaagggacaaaccactaagttacaaata

SEQ ID NO: 84 - DNA, 72 bp, Homo sapiens
ggactgagtcacctccatcggggaggggtgccctccgctctgcctgctgcagccacacccagcacaccccac

SEQ ID NO: 85 - DNA, 72 bp, Homo sapiens
gttggacactcgaattcccccaccctctctatgcccgaaagctggctggccccagcccaggccacccccaac

SEQ ID NO: 86 - DNA, 72 bp, Homo sapiens
ttacgcaatccatgactaacctgccctgcccctgccgccctggggaagctggcctgacggggtgggggacgt

SEQ ID NO: 87 - DNA, 72 bp, Homo sapiens
tgctgcctcagtgttgtgtatgctgtggctcaaatcgttatgccaccggccctgtgagggaggtgctagcat

SEQ ID NO: 88 - DNA, 72 bp, Homo sapiens
caggaagccaacacagggcccttgccctaaatggccgcctgcccaaagctctggcctgggccttctttccag

SEQ ID NO: 89 - DNA, 72 bp, Homo sapiens
gccaacctgttactcccactgctaaacaacagtaacgattgtgggaataactgactggcaggaaccctggca

SEQ ID NO: 90 - DNA, 72 bp, Homo sapiens
agcagaaaagcctgagtcagcggctggccgggaggcgtagtggctgggtgctgagtcacggtcccaggatat

SEQ ID NO: 91 - DNA, 72 bp, Homo sapiens
gtgcgtgagcgctgcctctgtgtggggatggtgtgcgcaaggcagtgctgaggaccttcaagccagtcagga

SEQ ID NO: 92 - DNA, 72 bp, Homo sapiens
tcagaagtgaggtctctttcatttttcttccttcacgtcaaggcttgactcactctgtctgctgggcttctc

SEQ ID NO: 93 - DNA, 72 bp, Homo sapiens
aaatgaacagatagtgaggctttgtgaggaacctacgatggatatgtggctgcagccttctttggagggttt

SEQ ID NO: 94 - DNA, 72 bp, Homo sapiens
accgctcgctgggcccattgagcctcgtgctaatccgggccgccaccgcgggcagcccaggcgggtgtcccc

SEQ ID NO: 95 - DNA, 72 bp, Homo sapiens
ctgcagcgtttgtgaggcatatcctgtcggggtgacgggcccatggggcgggtacggctcctcccagcctct

SEQ ID NO: 96 - DNA, 72 bp, Homo sapiens
cagagccgcatcgtgtactacctgatgaacatccacgtgcagccgcgtaccatctacctgtgccggcacggc

SEQ ID NO: 97 - DNA, 72 bp, Homo sapiens
ggtccctcctgctgagcctgggggctccctcaggacggggcctgccctgggctgacagcatgggcgtgtttg

SEQ ID NO: 98 - DNA, 72 bp, Homo sapiens
ataggtgtctggaacacttcctactcccggacagtcgagtcaccccacccttcttgctgtgaaccacctgtg

SEQ ID NO: 99 - DNA, 72 bp, Homo sapiens
tgcacaaatcaatacggtttctgtttgaggagtttcgccatcagattttaaagaggactggaaggaatacaa

SEQ ID NO: 100 - DNA, 72 bp, Homo sapiens
atgcagccaagacccggggccgccttgtctagccacgtgatctcagagatgttactcaatatctctaagcct

SEQ ID NO: 101 - DNA, 72 bp, Homo sapiens
ggcagagccccacgcgtgtccggccccgcgcaccgcggccaccaccttagttgcctcgtagggggctacgag

SEQ ID NO: 102 - DNA, 72 bp, Homo sapiens
gtaaatgcccttccaaaggttaaaggtcacccctccgcaacaacccagttctctctattgaggccttttccc

SEQ ID NO: 103 - DNA, 72 bp, Homo sapiens
tggtaccacttctgagaagcagcaaagcagacatacgtctttctctatcatcttctctgtctctcaatccct

SEQ ID NO: 104 - DNA, 72 bp, Homo sapiens
gttttgcctccctacctagggacccggcacaggggcgggaagggaggaatctgggagagctgagattctagg

SEQ ID NO: 105 - DNA, 72 bp, Homo sapiens
gcgtttggtatgtgctcagtgtctgctccattgtgcgcactcagcctatggtcatttttaatttttaaatcc

SEQ ID NO: 106 - DNA, 72 bp, Homo sapiens
tcttcctggacaggactgacacttctcctcccctacgagaggatttacaaacctgataaaaactgagatgta

SEQ ID NO: 107 - DNA, 72 bp, Homo sapiens
gcggcacgccaggcctagcctccggccgccaatcccgcccagaaatgtcctcacgtccaggccatgccgcca

SEQ ID NO: 108 - DNA, 72 bp, Homo sapiens
tagacctaagagaaaaaaacttgtgcaagttcacacgtggagtagtatatgaccatggtttcagagaactga

SEQ ID NO: 109 - DNA, 72 bp, Homo sapiens
aaagctgcgggaagagcagagtcaggctcaggaggcgcagcagcccgacggggctcccaggcaccgcgagga

SEQ ID NO: 110 - DNA, 72 bp, Homo sapiens
gctgtgtgcccttaaaccagccactacctctctgacgttcaaaattgagcaatggaaggcagcctgcccaac

SEQ ID NO: 111 - DNA, 72 bp, Homo sapiens
gtctatcagaacccagttcctgcaggagccagtgccggtactaggtagactcagatgactgaatggtcctcg

SEQ ID NO: 112 - DNA, 72 bp, Homo sapiens
ctcagctccaaggcagcaatagcaaatcactgtgccggagccactgcttaacatgttttacttccttttagt

SEQ ID NO: 113 - DNA, 72 bp, Homo sapiens
taggctggatcacaaatctcctgcatggtttgacccgcaggactattactttctctgttctgaactggagtt

SEQ ID NO: 114 - DNA, 72 bp, Homo sapiens
tactaagcatgacactaatgcaaactcaatgcatacgctacacaaacatataactccttatttggagctaat

SEQ ID NO: 115 - DNA, 72 bp, Homo sapiens
cccagctgggattagccccacccttccctacttagcgggctcttcccaatgccccagagctgtcacacagct

SEQ ID NO: 116 - DNA, 72 bp, Homo sapiens
gcagctgggccatctgccgggtgggactgcttagccggagtcctgagtcccgcactgctccccagtaggagg

SEQ ID NO: 117 - DNA, 72 bp, Homo sapiens
tgctgagctcagctttgcttcgccatgttccttcccgatccgctcatcctaaccctctctccttccgcctcc

SEQ ID NO: 118 - DNA, 72 bp, Homo sapiens
gccgaaggccgcgatggtgccataggtgagcttttcgttgggggtggcatggcgcttcagtcagcagccgca

SEQ ID NO: 119 - DNA, 72 bp, Homo sapiens
tccaagacagtgtgcgcattttgcccgagacaacacgggcctcagaccgggtaccgtgcccaagcacacacg

SEQ ID NO: 120 - DNA, 72 bp, Homo sapiens
tgtgtgggttttggatatggtgggaatcttgtctacgtcttctcaatcataaacgtttttaggcttgtttgg

SEQ ID NO: 121 - DNA, 72 bp, Homo sapiens
cactaaccacacgtggctctgggccacttgaaatgcggtgagtgagacggaaggactgaattttaaattttc

SEQ ID NO: 122 - DNA, 72 bp, Homo sapiens
tcattgtccttccctcgccttgttcacagttgtatcgttggcatctggtccagagcctggctctgagaaact

SEQ ID NO: 123 - DNA, 72 bp, Homo sapiens
cagctgggctggcccctcctctggtgctgccaacccgctgccaggcagaggggaggcccagaggagagggaa

SEQ ID NO: 124 - DNA, 72 bp, Homo sapiens
ggactgtgaaggggccagggtggagcgctgtattacgttagttcccccagaaactggaatgaagtgggtgga

SEQ ID NO: 125 - DNA, 72 bp, Homo sapiens
tgcccaaacgcagacctgagatccaagacttggctcgcaatgacaccaggctgggtggattttccttcaggc

SEQ ID NO: 126 - DNA, 72 bp, Homo sapiens
cccaagacttcaaataggtaagcaacagaccgtttcgatgtgtgcacatgtgaggtatcatcagtttccaca

SEQ ID NO: 127 - DNA, 72 bp, Homo sapiens
taccaccaggctgctggttgggctatgtgatcagacgggtccttcctcgctgaaatgtgctgggccgtttgt

SEQ ID NO: 128 - DNA, 72 bp, Homo sapiens
tgtacaaaaggctagtggggcagaaatccagcctgcgctgtactcgcccagcctggagccctgaccctctct

SEQ ID NO: 129 - DNA, 72 bp, Homo sapiens
aaccacaattatgatgcaatcaggactgtacttgacgatctgaggaataatgaatttgaagacattaacatt

SEQ ID NO: 130 - DNA, 72 bp, Homo sapiens
gagactagaaccagatgacaaagactgaaaacacacgccatgtattgactttcctataaaatactcattaca

SEQ ID NO: 131 - DNA, 72 bp, Homo sapiens
accagagaacattgcttcctctctgaggaggtccccgtggcctttcctgtctgcacaagagttcccttcaca

SEQ ID NO: 132 - DNA, 72 bp, Homo sapiens
ggagcatgcgcggtgagccccctcccctgctgctgcggggttcccgcgccccaacccctgccccggacctca

SEQ ID NO: 133 - DNA, 72 bp, Homo sapiens
aggtgattgacgtgggccggaggttcctggtgaaccgggtgcaggaccacatccagagccgcatcgtgtact

SEQ ID NO: 134 - DNA, 72 bp, Homo sapiens
agggatgctttgtgcctggagagtgccaggacaggcggggaggagtggttccgggaaaggccctggcaggca

SEQ ID NO: 135 - DNA, 72 bp, Homo sapiens
ccaagcaggccagggcaggcacggctttctcttcccgactatcacacacaggtggaacttaatccatgattc

SEQ ID NO: 136 - DNA, 72 bp, Homo sapiens
ctcagcattaagtcagctttaggagaacagtaaatcgcccatttatctggagacttcagctgtttgaaaggc

SEQ ID NO: 137 - DNA, 72 bp, Homo sapiens
agtattaaattgctgtggttagtagatccagaactcggctaaagaaacttatctcactcaaataaacaaaat

SEQ ID NO: 138 - DNA, 72 bp, Homo sapiens
acctcaacaatattctgtaagcctcttgaacatgccgaaatgtataggatggatgaaacggtgctgctgggg

SEQ ID NO: 139 - DNA, 72 bp, Homo sapiens
agatcatcagcttgctgaccacatttcaaagaatgcgagaaagcaggtgatcatattcccaagcctccagct

SEQ ID NO: 140 - DNA, 72 bp, Homo sapiens
tcagaatcaccccttacctctctcttacagtcatgcgtgccttacactttacttagttaattcccaagagaa

SEQ ID NO: 141 - DNA, 72 bp, Homo sapiens
ggaagtgacagcccgtggatctggcctacgcctctcgggcctctgtggcctcagagcgtctgggccacactg

SEQ ID NO: 142 - DNA, 72 bp, Homo sapiens
gccctagaggacatgttgcaggccctgaaggtccacgcgaggtgagtgcaggcagcctcagggctttcacat

SEQ ID NO: 143 - DNA, 72 bp, Homo sapiens
taaaactacagaacccacagaaggccacaacactccgaggacagagagatgtcttgcaaaactctcttatct

SEQ ID NO: 144 - DNA, 72 bp, Homo sapiens
ggggtggaaacggcttctccgttttgaaacgctagcggggaaaaaatgggggagaaagttgagtttaaactt

SEQ ID NO: 145 - DNA, 72 bp, Homo sapiens
ccccactccagcctcttacactaccgccagcaccccggctggcccagccttccccgtgcaagtgaaggtggc

SEQ ID NO: 146 - DNA, 72 bp, Homo sapiens
gatctgttgccaaagaacagggcacaacttccactcgctctgctagacttagactggccaaacccactctct

SEQ ID NO: 147 - DNA, 72 bp, Homo sapiens
tgaaggactacccaggcgttagtgcccttccagaccggctctagtgactggcggggaagaaggggaaaaaga

SEQ ID NO: 148 - DNA, 72 bp, Homo sapiens
tcaaagagtggctcagttctgcaacaggtgtgacccggcccggagggagggctgcacgtgctttcttcaggt

SEQ ID NO: 149 - DNA, 72 bp, Homo sapiens
aatatgactgcaccttttccattccatgctgcaatcgcatttacatctcgaaattgactctaatgaccaagg

SEQ ID NO: 150 - DNA, 72 bp, Homo sapiens
attcatcccagaaaaataacctgttttccaagtgacgttagattcagcagcaccacccctaccctattgccc

SEQ ID NO: 151 - DNA, 72 bp, Homo sapiens
gcacttccccagggcctacagctcacagcaggtggcgggggggcctcctgatctcatcacccaccacttcct

SEQ ID NO: 152 - DNA, 72 bp, Homo sapiens
cagggaatctgggcctgcccactggggcaggctcccgggcttgggagggacagaagcgtgggaggctggcaa

SEQ ID NO: 153 - DNA, 72 bp, Homo sapiens
gctggaggaacgtccctcattcaagtaaaggaagacgagtgaggttacagagcaaaagagggagacattctt

SEQ ID NO: 154 - DNA, 72 bp, Homo sapiens
cggcagtgaggtgaggctggtgagaggggaagtggcgacagttcagtcaactccctcaaaaccagtctggcc

SEQ ID NO: 155 - DNA, 72 bp, Homo sapiens
gtgggctgaaacctgaggcacatgaacagctacgccgggttgggttgggaaagagtcggaaataggggatgc

SEQ ID NO: 156 - DNA, 72 bp, Homo sapiens
tctcttcctgtgtggcctgcaggcaaaggtcacaccgctcacggtcagggctgtctcacttccgtttggggt

SEQ ID NO: 157 - DNA, 72 bp, Homo sapiens
tcttcctcctcctcctctgtggagttggggcacagcgagggattgggcctcccagggttgactggaggccac

SEQ ID NO: 158 - DNA, 72 bp, Homo sapiens
attccttgtgcaacttaagagttttgtaaataagacggcttggccttgtgtcaagatacatcaattggttat

SEQ ID NO: 159 - DNA, 72 bp, Homo sapiens
catcccattttcaaaagaagatgtccttgctttctcgtggtttctctcacccacgcagttcaacacacagaa

SEQ ID NO: 160 - DNA, 72 bp, Homo sapiens
aaagaggaaattcagtctgaagttttagaatatgtcgtagtgaaatactatgtgtcagaagctgcacagtct

SEQ ID NO: 161 - DNA, 72 bp, Homo sapiens
agtttgcttgcagggaatgggtgcggttgagcgcccgggcctggccagagcctcccagtttacatcctgctt

SEQ ID NO: 162 - DNA, 72 bp, Homo sapiens
gaaagcagtggccacagctgtggtgtgtgcacacccggccatcagtcgctggagtattgattactgagcaat

SEQ ID NO: 163 - DNA, 72 bp, Homo sapiens
catctgagttctcagacgctggaaagccatgttctcggctctgtgaatgacaatgctgactggagtgctgcc

SEQ ID NO: 164 - DNA, 72 bp, Homo sapiens
tgtcacatgaggctggtttggtttcacacagttcccggtagcttttcacataccctcccttcctggattgca

SEQ ID NO: 165 - DNA, 72 bp, Homo sapiens
aatcccactgttaggtggtaatgggagaaagatcccgggggtttaggttgaaattctgtctagctgagtact

SEQ ID NO: 166 - DNA, 72 bp, Homo sapiens
ggaaatatacagaagttgagcaacatgcccaaggtcgctaaactagcaagtggcagaggaaggattcaaagc

SEQ ID NO: 167 - DNA, 72 bp, Homo sapiens
aagagaccacaggccacggttacacacactccacgcggtgccaagtgagccactgacagaaggagaaagaaa

SEQ ID NO: 168 - DNA, 72 bp, Homo sapiens
agaccactaaagcttcagtgagcccagaaagtgtgcgctcagtcccacattgcagaggcctctccgtcagta

SEQ ID NO: 169 - DNA, 72 bp, Homo sapiens
caggcccacacactccctttcctcgtgagggtcaccgacctgcctacttgggaacgacatagacctgacagt

SEQ ID NO: 170 - DNA, 72 bp, Homo sapiens
aataggatctggactggtggatgcaaaagtgaaagcgtgctgtgagtggggaagtgggaggaaaaatgtcaa

SEQ ID NO: 171 - DNA, 72 bp, Homo sapiens
tttttttctaccctattttttttctaatgaaaagccggaagttgcttggtgagacctgaggaatgagtcagt

SEQ ID NO: 172 - DNA, 72 bp, Homo sapiens
cagagattaacctggtccagggagggagggccaggcgtgtgtatacatgccagaggcatgggtggggatcct

SEQ ID NO: 173 - DNA, 72 bp, Homo sapiens
ccaggaaatgagtcaggttaggaggcagagacagacgaggagccgcaggggaaggctcatcactagcatgtt

SEQ ID NO: 174 - DNA, 72 bp, Homo sapiens
actttgaagaggttttgtgacataccctgaaaaaccgcagcttccttttctaggttgatgagtcaggggatt

SEQ ID NO: 175 - DNA, 72 bp, Homo sapiens
aggctcctccaaatgagtgcctcagcagaaagatccgagctggctgggaggtatataaccattccatgctct

SEQ ID NO: 176 - DNA, 72 bp, Homo sapiens
tgggtgtgcgactagggtgccagccaggccagggacgtccaggactggaagaaatgcaggggcaggaccaca

SEQ ID NO: 177 - DNA, 72 bp, Homo sapiens
gatcgtgacgtgcatgagctggtttctgtgctgcacgccagcctcgggtaaagctgccgctgccgccaccca

SEQ ID NO: 178 - DNA, 72 bp, Homo sapiens
cgcctccgcgcgctctggaggggcgcgggtggacgcgggacctcaaggcaggggacagacagggacaggcac

SEQ ID NO: 179 - DNA, 72 bp, Homo sapiens
aatatttcagtcttgctgaaacagctgttcccactcgggtccgagagcgggtgggagtagagatggtgtgtg

SEQ ID NO: 180 - DNA, 72 bp, Homo sapiens
attgaattgaattggtgggcacccagcagctgtcccgtgacaaatccctcgcgtggtcacagaagtcttctg

SEQ ID NO: 181 - DNA, 72 bp, Homo sapiens
cctctccagcccctcctctcttccttcctgtctcccgctcatctggttcatcttgctgcatcctgcagctcc

SEQ ID NO: 182 - DNA, 72 bp, Homo sapiens
gaaatgtcccattaggggtgtcttgtcttgcctctcgtgtcttctattttcccttcctcctctaaaacaaaa

SEQ ID NO: 183 - DNA, 72 bp, Homo sapiens
agcatgaggtgggggtcagaagttgaggaacaactcggacctaaagccttgacaattgccaacagtgtagac

SEQ ID NO: 184 - DNA, 72 bp, Homo sapiens
ccacgcagaccaacaatccactgccttcccagagacgccttgtgtgagaaaggcagagactggagggctccc

SEQ ID NO: 185 - DNA, 72 bp, Homo sapiens
aggggtgagttgtggggaagtagtgattctcagttcgtttgctcagcccagtcagtgcctgacactcagggt

SEQ ID NO: 186 - DNA, 72 bp, Homo sapiens
tgcatttttgacactgtgacccttcaataccaatacggctttttagacagtaattcctggggccctctaaca

SEQ ID NO: 187 - DNA, 72 bp, Homo sapiens
ggcgcccccttctgttccagggtgaacatagcacacgccctcctggctgggcctcaggaggaacagccaagg

SEQ ID NO: 188 - DNA, 72 bp, Homo sapiens
ctttaaagcagccttgcagagagccaaccagaccacgtgctccaaatccaaaagcagtttacaaccaggaaa

SEQ ID NO: 189 - DNA, 72 bp, Homo sapiens
tgggacctgagttcattcatggcatgtccaggccacggggtttagtgcagtgcctcctgcacagcagtaggg

SEQ ID NO: 190 - DNA, 72 bp, Homo sapiens
cccggtggggggcaggcttagaccctggcgagccccgtgcgaaaccacctcggctcttcctaggtccgctcc

SEQ ID NO: 191 - DNA, 72 bp, Homo sapiens
tggttacaatttgctatggcaaagttcaaaatactcgcaaaataagtcaactgtatgaactatcagcttctg

SEQ ID NO: 192 - DNA, 72 bp, Homo sapiens
gctgatgaacttcaagtccggtaacatatgcccgccgccccttccgcatgtgcccgccgccccttccgcgcg

SEQ ID NO: 193 - DNA, 72 bp, Homo sapiens
ggtggcagagggagcagggccctaagggaaactgacgcctgtgcagcacgaaccccactcgcgtcctgtctg

SEQ ID NO: 194 - DNA, 72 bp, Homo sapiens
aagactcatgcctcagacacactgatgcaatgagacgctaatatcatattgcatcatctgatcctaggtgtg

SEQ ID NO: 195 - DNA, 72 bp, Homo sapiens
catctggaacccacggaggcctgtaagggctccctcgctgctccttgccttccctgggttggaagtgggggc

SEQ ID NO: 196 - DNA, 72 bp, Homo sapiens
aggggtggctgtaggagggacacccagcgtggcatcgatgagctggattaagatgctgctacgcaaacagga

SEQ ID NO: 197 - DNA, 72 bp, Homo sapiens
taattgggaatgatgatttcacagactagagtctccgatgctggtcatgatgtcaaaactaagttctgactc

SEQ ID NO: 198 - DNA, 72 bp, Homo sapiens
ggtgcagccagcctcccccaccaccccaggctgtccgcccaggctccaggaatgcaagttcccgctcacagg

SEQ ID NO: 199 - DNA, 72 bp, Homo sapiens
attctgcaaaatggcacagcagattcctctgggtccgtcagaaaagaaaatcttttacacttttgtataact

SEQ ID NO: 200 - DNA, 72 bp, Homo sapiens
tcatttgagcaatcctccgttttgttctactgcatcggttttccctttctactgaagtattctcatcagaac

SEQ ID NO: 201 - DNA, 72 bp, Homo sapiens
ggagcatctatgtactccaagtgccatgtagaggccggggattcagtgagccacacaaagacggttcttgcc

SEQ ID NO: 202 - DNA, 72 bp, Homo sapiens
tgccgggcccccgcttggcattctggcgccgccttcggtcccagtgactcctggagctgctggggctccggc

SEQ ID NO: 203 - DNA, 72 bp, Homo sapiens
cacatacatcttttatcgtcctgatctaccctagacggtctcatcactatactggctcctccttacccccgt

SEQ ID NO: 204 - DNA, 72 bp, Homo sapiens
caaaatacacatacagtcagtcatgagtcacttaacgatggggttacactgagaaacacatcattagatttc

SEQ ID NO: 205 - DNA, 72 bp, Homo sapiens
gcgtgttctgacccaaagctgcctgaagcgctgctcggtgtgcacttgaaaatcagcgaaatgctgagcgtt

SEQ ID NO: 206 - DNA, 72 bp, Homo sapiens
taaagcactctttctgccacaacacataaggttgccgtgcatttttgacactgtgacccttcaataccaata

SEQ ID NO: 207 - DNA, 72 bp, Homo sapiens
acaggggatgtgtggatgcatacagccagacccaccggcaaacagcctcaagcctggagcacagaaatgccc

SEQ ID NO: 208 - DNA, 72 bp, Homo sapiens
ccccgcttggcgtgcaaggccctctttggagctgccgtgggacctggctatgcgtcctgtttctgtctggag

SEQ ID NO: 209 - DNA, 72 bp, Homo sapiens
aagatcttccaactaagccggagagcggggcgcaccgcacggcgtggagcataacgcccgggcgagggtgat

SEQ ID NO: 210 - DNA, 72 bp, Homo sapiens
taaaaattagttttccagttacccgggctggagtgcgatggcgcaatctctgctcactgcatcctccgcctc

SEQ ID NO: 211 - DNA, 72 bp, Homo sapiens
gccagcaaggaggtggcagagctgggattcttgatcgcaaacaccgcccttgactgtctctgcctgtggcta

SEQ ID NO: 212 - DNA, 72 bp, Homo sapiens
ctggtgaaatgacaagccaccttgccagcaccacccggcctgagccctggggactcatgatgcctgcatgat

SEQ ID NO: 213 - DNA, 72 bp, Homo sapiens
gaaaccatgctccttaccatgatgcaatccagcctcgcaaatataagaggccaggcagcaaagtaaatgagt

SEQ ID NO: 214 - DNA, 72 bp, Homo sapiens
cctgcctgagacaacacagctggtcagtagtggaccgggatttaaaccccacaatgctgctccagatttcac

SEQ ID NO: 215 - DNA, 72 bp, Homo sapiens
gttgaaacctcctttctgttcttgcaatggtatgacgcacaaaagcaatcttaaggggaatgaaaactgtcc

SEQ ID NO: 216 - DNA, 72 bp, Homo sapiens
ctttaaagtccctggctcggttaaaaagctggttgcgtagattcctgtcaatgctcaggatcctctgccttg

SEQ ID NO: 217 - DNA, 72 bp, Homo sapiens
tttgataattctgtgcttgacacagcatcttctatcgtctctgaaggaaccaaatgtttcagagctttgtgt

SEQ ID NO: 218 - DNA, 72 bp, Homo sapiens
accacatacacacacgcacgcacaccacaggaaaacgcatcagatgaagaacttccccagtccagtgcagat

SEQ ID NO: 219 - DNA, 72 bp, Homo sapiens
ccccccgaggtgcagatccccacatccgccgcacccgtgtggagaaaacagcgctggatttcctgtcgtggg

SEQ ID NO: 220 - DNA, 72 bp, Homo sapiens
tcatcactaagccctggggaaacacaatggatcagcgaggccccaaatgcagatgtgattagcacactggtc

SEQ ID NO: 221 - DNA, 72 bp, Homo sapiens
ctagcgtcatggggccaagcggccagaacagcctccggcaggtgggcagcacagaccaacttcctctgcaag

SEQ ID NO: 222 - DNA, 72 bp, Homo sapiens
ggctggcgctccctgagcctccctcaccggtctcacgtaaccatctgagtaggttgcatcccagatcctcgc

SEQ ID NO: 223 - DNA, 72 bp, Homo sapiens
ggagagcggccgccccgcccctgcggagcacaggacgcttcctgccacccctgcagagcatgggacgcttcc

SEQ ID NO: 224 - DNA, 72 bp, Homo sapiens
cgggaagccgtggcatggcttggtgaacacaggctcgccgacccgggggcggatgctgaggttgccattgtt

SEQ ID NO: 225 - DNA, 72 bp, Homo sapiens
aggatgaccctgttgacggtctaggtggactcctccgtgagaatcagctagcgcctggctgtagatgtggtt

SEQ ID NO: 226 - DNA, 72 bp, Homo sapiens
tacaaaacaggaagaatactcctcacctcacagggcgtagtaaggattgcaaagggcagaagagtttgtcag

SEQ ID NO: 227 - DNA, 72 bp, Homo sapiens
ccctggcccccactttacatcctgatttgtaaccccgcagtgactaacatagctcccacctcctggcctgtt

SEQ ID NO: 228 - DNA, 72 bp, Homo sapiens
cccgccttggcctcccaaagtgctgggattacaggcgtgagtcactgcgcccggcccgcagaaggatattaa

SEQ ID NO: 229 - DNA, 72 bp, Homo sapiens
gaatgggcttggtccttcctccctggcctctcttgcgtggctccatgctctgagctgcctactcgctgactc

SEQ ID NO: 230 - DNA, 72 bp, Homo sapiens
ggaagagctcgtctggcaggaaaaatgatgatcagcgagggcccaatgccagtagccctgggatctcccagt

SEQ ID NO: 231 - DNA, 72 bp, Homo sapiens
gaagccattgacacaagtcttgggttactcacctccgtgcaattcggggccacaccaatgcacagcctgagc

SEQ ID NO: 232 - DNA, 72 bp, Homo sapiens
tcactagtccaacggcaactttcttgatggtttcccgtctctagtctcacattcttaagtccgcccctccat

SEQ ID NO: 233 - DNA, 72 bp, Homo sapiens
gaaaacccattataaatcttccgtgcatgccgttgcggggtggtgcgttgtcagacatagagattgaaatca

SEQ ID NO: 234 - DNA, 72 bp, Homo sapiens
tccaaggctctgggagcgtctgttggaaaaccccacgctcaagaccacaggcctgggcacggcagagggcca

SEQ ID NO: 235 - DNA, 72 bp, Homo sapiens
tcccacaaaccttgggggctaggctgaggtccagccgctaaactctgcaattcctcactctcctgttcatac

SEQ ID NO: 236 - DNA, 72 bp, Homo sapiens
gggatgtgaagggtggttggtgagtcatgccttttcgtctactcattgtggcaggatgtgagctctgggggc

SEQ ID NO: 237 - DNA, 72 bp, Homo sapiens
tcctttgctttagtctgaaactccgagttccagtgcggtgctcctcctttagcatagggtagtgagtgtatt

SEQ ID NO: 238 - DNA, 72 bp, Homo sapiens
tttgcatggacatatgtttttacctctcttggttacgtacctaggattagaattgctgggttacatggtgac

SEQ ID NO: 239 - DNA, 72 bp, Homo sapiens
gtcatactaaatatttattttctgcagactgacttcggagtaattcttgagccaggaggggagaggttagtg

SEQ ID NO: 240 - DNA, 72 bp, Homo sapiens
aaacaactcacagaggttctgcaacctgcttccaccgtctttctagaaggaggtcagaaagggaacagatgc

SEQ ID NO: 241 - DNA, 72 bp, Homo sapiens
acttggtgtggaactcatggttgcaggggaggactcggagcagctgccgcgcctcgaagtcactgaagcaga

SEQ ID NO: 242 - DNA, 72 bp, Homo sapiens
agatgatgctgttttactcactgcattcatgattccgtagagtgatgtgccttcagttcctgaaaatgactt

SEQ ID NO: 243 - DNA, 72 bp, Homo sapiens
gcgtgtgctgagcaccaagcagagggagctgagcccggcgccagccttctccagttctgagcaggacacagg

SEQ ID NO: 244 - DNA, 72 bp, Homo sapiens
aaacttctcaacgcaaacacatgcgaggcaggaagcgtctacagcgctcccgttcctgcgcacgcaggcccg

SEQ ID NO: 245 - DNA, 72 bp, Homo sapiens
gccggccaatgggctggcgctgtgggtgctggccacgcaggcacctcggctgccctccaccatgctgctgat

SEQ ID NO: 246 - DNA, 72 bp, Homo sapiens
cggctggtagctgaacccaggaagccctggccccacgtctctccctggaaccaccagaccacacagcctcct

SEQ ID NO: 247 - DNA, 72 bp, Homo sapiens
tcagatcaacttcttttgcaaaagcacaagttacacgttgcacggttggggatgctgagtgaatgcattcca

SEQ ID NO: 248 - DNA, 72 bp, Homo sapiens
gggtgtttcactgggggaactatggacagaagcatcgtcttggatggccacaaggcaggtagatctccatgc

SEQ ID NO: 249 - DNA, 72 bp, Homo sapiens
gtgtgtgtgtgcgcgcacaccagcaatcagtgtggcgaggccagaggctttcatcactgaaacactgagttc

SEQ ID NO: 250 - DNA, 72 bp, Homo sapiens
ggtacaggggacaatgggttttcttgagaactggccgagagggcatatctggttcaaaaccctcattttaca

SEQ ID NO: 251 - DNA, 72 bp, Homo sapiens
agaaagggtgggggccggccggaagccccgtgggccgaagccaccccaggccctcagcccagaccaccaggc

SEQ ID NO: 252 - DNA, 72 bp, Homo sapiens
ttatgctgatctgagcccttcctcttcctggggaccggaaccaatggggtgggggccagtgagagtcttgga

SEQ ID NO: 253 - DNA, 72 bp, Homo sapiens
acgactgccacgtaagaggaatcccaagcatactgcgatcaagggaagggaagaaaatccactcccagaagc

SEQ ID NO: 254 - DNA, 72 bp, Homo sapiens
caaatgatgaaatcacccaaaatagctggaattaccggcagattgtgtagtggtgaacctatggttttctga

SEQ ID NO: 255 - DNA, 72 bp, Homo sapiens
ccggccccatctgtgccgtctcagacagacagctccgtcctcatcaggttcaggtctggccccggcgcttgc

SEQ ID NO: 256 - DNA, 72 bp, Homo sapiens
aactattttagcatccctaaaattaggacagtagccgtgagttaaataaaacagcaagtggaagacacaggt

SEQ ID NO: 257 - DNA, 72 bp, Homo sapiens
tactcaccagctcttcagaacaattgtggctgaaacgtggcagctggcagacttctacgtatatgaagttaa

SEQ ID NO: 258 - DNA, 72 bp, Homo sapiens
tcaagctttttatacaatgcccctttgttggaattcgtctgatgttatccttatgattagactagtgttttg

SEQ ID NO: 259 - DNA, 72 bp, Homo sapiens
cagtaatagtgcatgcggcccagggtgcccgtggccgtggggctgggccccagcgtgcctgtgcccagcagg

SEQ ID NO: 260 - DNA, 72 bp, Homo sapiens
cagagcccctcccaattcattttggaaatgtggcacgagtaagaagtaaagttctgttttatgtgacagatt

SEQ ID NO: 261 - DNA, 72 bp, Homo sapiens
acacagtgtctctagtcccctccttccctgctgtccgtatcagtcagctttcatagcagaaggaaatctggt

SEQ ID NO: 262 - DNA, 72 bp, Homo sapiens
agtgctcgtctgcagtgaagggtggcccaggcttccgcttcctgcccacataccccacctgcccctccctgc

SEQ ID NO: 263 - DNA, 72 bp, Homo sapiens
gcagagggagtggaagggagcgcgagggcgggcggcgggagcacacaccagcagcaggcggatgaaggacag

SEQ ID NO: 264 - DNA, 72 bp, Homo sapiens
gtgttcgggtcgagatttacagcggagtctcatcccgggacgtgtgagtgcacttcagcgcaggactgccct

SEQ ID NO: 265 - DNA, 72 bp, Homo sapiens
ctatggtccagacagggggaccaggcactttccagcgcctggatctgcagacgcgaggtcttctgtattctg

SEQ ID NO: 266 - DNA, 72 bp, Homo sapiens
tgagcggcttgtggttagctccaggggagacttgccggctggcctgggaggcagcatcactgcccagccttc

SEQ ID NO: 267 - DNA, 72 bp, Homo sapiens
ctctacttttccaggagcttagtttattgattcatcgcctactttaggtcaggcagtttgccaagagctgtg

SEQ ID NO: 268 - DNA, 72 bp, Homo sapiens
aaacctactgtgaccagctgtagacataagaccagcgggaagagcatccctggcccctccatccatcctcca

SEQ ID NO: 269 - DNA, 72 bp, Homo sapiens
cccacctcgacttcccaaagtgctgggattacaggcgtgagctactgcacccagccacatcaggacttcctg

SEQ ID NO: 270 - DNA, 72 bp, Homo sapiens
cccctgggctcgggggtggtgagggagcttcgtcccggctgggcccgggctggggactcggcctccctgggc

SEQ ID NO: 271 - DNA, 72 bp, Homo sapiens
gggcttatgagaaacatttcattattatttgggaacgagaacagttgtttttggtttatctgagaacaaaag

SEQ ID NO: 272 - DNA, 72 bp, Homo sapiens
cacatgcccaccctgtattttaagaacagaagtttcgagttcttagtatgcaggtctgttagtgatcagcaa

SEQ ID NO: 273 - DNA, 72 bp, Homo sapiens
ctgccaggggaagtccctggacttcttgcttctttcgtgtaggacaggctgtcgaaacctcagtggataaaa

SEQ ID NO: 274 - DNA, 72 bp, Homo sapiens
cttccgcaggcattgcccaactctgtggcctcctgcggcttccagcagcccaggaaggagggccctgggtga

SEQ ID NO: 275 - DNA, 72 bp, Homo sapiens
ctactgtttcatgattttcttcttaattttgattccgtttccttcactgtctcctttctctcacacctttaa

SEQ ID NO: 276 - DNA, 72 bp, Homo sapiens
gcagtttcagtggaatggtgagatcagaacgcagacgggagtggggcaggccatgaaggtcagggtgatgat

SEQ ID NO: 277 - DNA, 72 bp, Homo sapiens
ccctcgccacacacggggtgccgtcaatcagccagcgccgcctgccagcccagcgcacctgttgtgtgcccc

SEQ ID NO: 278 - DNA, 72 bp, Homo sapiens
ggctcactgggtcctcacagtgacttcctgtggctcgtcacccagcctttctagtgtgacgttacctccctg

SEQ ID NO: 279 - DNA, 72 bp, Homo sapiens
aagggaaccaaggcaggcctggtcatatgggacaccgagttgcagagagatttctagaggaggtaatgacaa

SEQ ID NO: 280 - DNA, 72 bp, Homo sapiens
tggtctcaagtgtgactaacaggcacttaaaagatcgtaaagcaaagagatggaaacagtaatacagacaat

SEQ ID NO: 281 - DNA, 72 bp, Homo sapiens
taatcctactgggctacaactgacagtgccaggcccggggccacatgcttcacatacatgagatcatgtcag

SEQ ID NO: 282 - DNA, 72 bp, Homo sapiens
ggcctgggccctttcccaacccctcctaggatgtgcgggcagtgtgctggcgcctcacagccagccgggctg

SEQ ID NO: 283 - DNA, 72 bp, Homo sapiens
gcaggaaagctagcaggctcctctgctcaccagtccggcatttgcacaacactgagactgacagcttgggtt

SEQ ID NO: 284 - DNA, 72 bp, Homo sapiens
gctcggatccgggaagagggccttctgggcgatggcgagtggtttggctttatcccaagcctgagaggaagc

SEQ ID NO: 285 - DNA, 72 bp, Homo sapiens
gtgaggccggggtccctgcactcctttgctgggcgcgcctggaccgaactgaagggcccgggcgccgcgacc

SEQ ID NO: 286 - DNA, 72 bp, Homo sapiens
tggagccaggctgccggcaaagcgctgctcactgccgctttcttcacatgtggtttgattgacgcaaatcaa

SEQ ID NO: 287 - DNA, 72 bp, Homo sapiens
ggtcccctggccttgaatgcagtcactggtgtctgcgccctatccacctccctcaacgcaccgattcccagg

SEQ ID NO: 288 - DNA, 72 bp, Homo sapiens
ctggcacctggcgctggctgcagacgggaagtcaacgccaccaaagcagaggacctcagccacccaggttag

SEQ ID NO: 289 - DNA, 72 bp, Homo sapiens
tgtcaccatcaggatgaaggacaggggtggcccggcgtggagaagctaagaagagatggcgataggtcaacg

SEQ ID NO: 290 - DNA, 72 bp, Homo sapiens
gcctcgctcactttgtctgcctttgtatctgctggcgtggatcttgtcaccatggcatgacactatatccaa

SEQ ID NO: 291 - DNA, 72 bp, Homo sapiens
caggccagccccggtcttgtacgcattaggtcgcccggcggggcaaggacactgtcacctctttgcaatcag

SEQ ID NO: 292 - DNA, 72 bp, Homo sapiens
gatctgaatgggaatgttgtaatggcattactactcgacaagactggttatctggccagagaaaaccaggtt

SEQ ID NO: 293 - DNA, 72 bp, Homo sapiens
cctgcctgctcaaggtggctgagcccaggcacaaacgtggggctgctagccctgattccctgggacaggctc

SEQ ID NO: 294 - DNA, 72 bp, Homo sapiens
tgtcacctccatttcctgaatcccttatcataaaacgtctttcttcctttgaaatcttttactttcttttcc

SEQ ID NO: 295 - DNA, 72 bp, Homo sapiens
cggccgctcctggactccagccctgttggggctggcggggtcagcaggcgctgggttccagcctcaggtggg

SEQ ID NO: 296 - DNA, 72 bp, Homo sapiens
acgggtggctgggaaccctgcttgagaagagattccggagcctctggctggtcccgagtgtcaggcttgggt

SEQ ID NO: 297 - DNA, 72 bp, Homo sapiens
aggcaacaacctcacatgcctacctcactgccactcgtccgcctcgtccactcctggcatttgggataaaca

SEQ ID NO: 298 - DNA, 72 bp, Homo sapiens
tggggtcgggcgcatttatgggccctcgccggctccggacagtaagagctgagctgatggatcgcctgccag

SEQ ID NO: 299 - DNA, 72 bp, Homo sapiens
aggacaaatgatgtcatccagaggacccaaccacccggatctgagacacagtaagcctccatcatccaccca

SEQ ID NO: 300 - DNA, 72 bp, Homo sapiens
ctctggcgcagcagcgaagctggaggcgtttgctccgctctgcccggagcaaggggcgcgcaggggaaaccg

SEQ ID NO: 301 - DNA, 72 bp, Homo sapiens
aggtttcacaccctcagattccccacccaccccagcgcaaaaggggcgtttaggaagacactggtttcctga

SEQ ID NO: 302 - DNA, 72 bp, Homo sapiens
agagtttaagggaagtggaggaaccgccaaggggtcggctaaggttttggaaacatccttggtgagaaagac

SEQ ID NO: 303 - DNA, 72 bp, Homo sapiens
gaagcaataagaagaaagggtcactgggtgtgtggcgaaggagaagtggaaagggcgccaagattttaggcc

SEQ ID NO: 304 - DNA, 72 bp, Homo sapiens
caaagccacaggaagtcaggcttccaggggaggagcggtggccggcagggatgctgctgaggaaccaggtga

SEQ ID NO: 305 - DNA, 72 bp, Homo sapiens
caggaagggtggagtctttgcggggtgagaggatgcgtgtggacagtgataacagcagctagcctacgtatg

SEQ ID NO: 306 - DNA, 72 bp, Homo sapiens
tacaatcgtggtcaccgtgacaaggagggtggcagcgtggccaggcacaggatgcacccaaggagagcagca

SEQ ID NO: 307 - DNA, 72 bp, Homo sapiens
ctgatgatctagcccatgttttccacaccacctaccggtaactggccttttcatttctttcagggaactggg

SEQ ID NO: 308 - DNA, 72 bp, Homo sapiens
gtcaattgctcaggtattattgcctccaactgttacgtgtacattttgtacccatgattccttagtagatct

SEQ ID NO: 309 - DNA, 72 bp, Homo sapiens
agctgcgaatatgtgcccctggccacaggattacacgtaggaagccagcacacgctacgctatcattaccat

SEQ ID NO: 310 - DNA, 72 bp, Homo sapiens
gtggaccaggagctatttaacgaataccagttcagcgtggaccaacttatggaactggccgggctgagctgt

SEQ ID NO: 311 - DNA, 72 bp, Homo sapiens
cgggggctaagggggtgggggggcctgggctttgccgtagatcaccatggaaacggcagcctcggccaatca

SEQ ID NO: 312 - DNA, 72 bp, Homo sapiens
gaagatgctggaagtggtaagggccctgaagccaccgccatggtctgtgtgtgttcccatccaaactgcaga

SEQ ID NO: 313 - DNA, 72 bp, Homo sapiens
caagctaccaccaggcggtcagctttgccagctgacgtcccaaacagctggcatggggcatgcacacagtag

SEQ ID NO: 314 - DNA, 72 bp, Homo sapiens
aagaggtagggggtggaggttcaggggtgaggatacggagtgggaacaggaactgcggccaggcaattggga

SEQ ID NO: 315 - DNA, 72 bp, Homo sapiens
ggtgctcaccaatgttgcataagcacacaagtgagcgtgcctgcaggatggcagacagaaaaatgttttgca

SEQ ID NO: 316 - DNA, 72 bp, Homo sapiens
aaaaaatccaggcctcctgactcctagcctggagccgtcctgtttccttctgtttcttaaaaaaaaaaaaaa

SEQ ID NO: 317 - DNA, 72 bp, Homo sapiens
agggagcagtgagcagcatttatctcgggtggagacgtgggtggtttcacagagtgtggatctgccctcctc

SEQ ID NO: 318 - DNA, 72 bp, Homo sapiens
cgccctatgtctgctttttcatttttcctgttcctcgtctcctttctcccccaaccccgtttttcttcttgg

SEQ ID NO: 319 - DNA, 72 bp, Homo sapiens
cggagggctcccgggaatgccctccccgccattttcgccgatgagctcgggctcacccttccactggaagcg

SEQ ID NO: 320 - DNA, 72 bp, Homo sapiens
cacgctggccgagctgaatgggggtcggggtcatgcgtcacggcgaccagaccgacaggtgactctgcccct

SEQ ID NO: 321 - DNA, 72 bp, Homo sapiens
ggccggagccgcgggggtgagtctagccccagctccgagctccgagccgtggtcctcagccacactccaagc

SEQ ID NO: 322 - DNA, 72 bp, Homo sapiens
aagttaagccttcaaaaacttttcagacatgtgggcgactttttttttttttttttttttttttttttttga

SEQ ID NO: 323 - DNA, 72 bp, Homo sapiens
ataataaaaagtcaacaaagcatgtgcaaatcccacgctgttactagaacctactaccctgcctttgaacat

SEQ ID NO: 324 - DNA, 72 bp, Homo sapiens
gctgaagctttctacttaagccgggtttaaaaacacgtccacaaaaggatattttcttataaaaccagagtt

SEQ ID NO: 325 - DNA, 72 bp, Homo sapiens
gagtgggagataaggctcatggccacagacatctgcgtcagagataggaggtctcaatgccacgggcagggg

SEQ ID NO: 326 - DNA, 72 bp, Homo sapiens
acccccaagcctgaccacctagggaaaaggctcaccgttcccatgtgtggctgataagggccaggagattcc

SEQ ID NO: 327 - DNA, 72 bp, Homo sapiens
attagattggaattccaagaaggaagcttagaagccgtctagagcactcctgtgggcatgcagagcgcctag

SEQ ID NO: 328 - DNA, 72 bp, Homo sapiens
ctggttctccctacataggatgaccagccagaggccgatgggtggaatgttcccacagagtcagagaggatg

SEQ ID NO: 329 - DNA, 72 bp, Homo sapiens
aattcctcctaaaagttgcctgcattctctgtgtacgctcacttcccatcctcttctcttcaaatggctctg

SEQ ID NO: 330 - DNA, 72 bp, Homo sapiens
gatcagcccagggctggtgcgacaccctggactcccggccaggaaggcacggaggagggcatgggtgtggcc

SEQ ID NO: 331 - DNA, 72 bp, Homo sapiens
ggtcactgctgcacttgactctgagatcgccacgtcgcctcactggggcctccacgccctgccccaggaggt

SEQ ID NO: 332 - DNA, 72 bp, Homo sapiens
caacctgatgtcatagacaccatcagttttgcatacggggaaattgagggtcagattggttaactgatttac

SEQ ID NO: 333 - DNA, 72 bp, Homo sapiens
agtcattcctaacagtaatttctatgtatccagaacggcctgcagagataatacttctgtctatcacataag

SEQ ID NO: 334 - DNA, 72 bp, Homo sapiens
agagcgctaggattaaaggcgtgagccaccatgcgcggccttcctattacattctgagcacagggggagtga

SEQ ID NO: 335 - DNA, 72 bp, Homo sapiens
cacatcaattatatggtgatccgctccagggaacccgtaagaacacaacgcactgaacagagggaggatgtg

SEQ ID NO: 336 - DNA, 72 bp, Homo sapiens
tcacagggagactagcggcccggggcagagaacgccgccatcagatcacagcattttgagaagggaaagtgg

SEQ ID NO: 337 - DNA, 72 bp, Homo sapiens
ggactcagccatgaaaaggaacaaggctctgatgccggccacagtgtggatggaccttgaggacatcacact

SEQ ID NO: 338 - DNA, 72 bp, Homo sapiens
cgggatcctcatcgtcgtcaacacagtgggtgctgcgcttcagaccctgtatatcttggcatatctgcatta

SEQ ID NO: 339 - DNA, 72 bp, Homo sapiens
gtcagctcagactgtgcaacttttataaacaacatcgattcattgcttacagttctggaggttgggaagtcc

SEQ ID NO: 340 - DNA, 72 bp, Homo sapiens
gtccctgtttaactcaagagtaaatcctaatcttccgagtgcctgaagtaatggaaggttacaggaagaaaa

SEQ ID NO: 341 - DNA, 72 bp, Homo sapiens
gctgttgctttcttgtcaccatctgagttctcagacgctggaaagccatgttctcggctctgtgaatgacaa

SEQ ID NO: 342 - DNA, 72 bp, Homo sapiens
gagccaaagtcaaaggggcagggctcccccaaagacgttccccctctggaaaagtcaaaaccgaccttgagg

SEQ ID NO: 343 - DNA, 72 bp, Homo sapiens
ctgggctctgccaaccgccagctcccgactcggggcgtcgtccctcacccattcccgcagcccctacctgaa

SEQ ID NO: 344 - DNA, 72 bp, Homo sapiens
cacagccagttccagacttgagtgaagccagatctcggtgccttccagaccctgactgaaagatcaagggag

SEQ ID NO: 345 - DNA, 72 bp, Homo sapiens
ttctgcctcctctccctccaagatttcagataaagcggctgccttgctgcagcgaatccgcacaattaaaag

SEQ ID NO: 346 - DNA, 72 bp, Homo sapiens
aggaagtgcaggctctgagaggtgaagtgtgtggccgaggatctaccccccaccccagaagcaggtccacag

SEQ ID NO: 347 - DNA, 72 bp, Homo sapiens
atttttcctgttatttgtgctccggggaagcgccgcggggttcctggaagagacacctattacctaggctcc

SEQ ID NO: 348 - DNA, 72 bp, Homo sapiens
tgcaactcccagctttcctatatgtccaagggcggcgagggctcaaaagtcctggataatccgcagatagaa

SEQ ID NO: 349 - DNA, 72 bp, Homo sapiens
gtgacccgtgctggcctctgccttcgcctgaagtccgaatcaggcgtgttctgacccaaagctgcctgaagc

SEQ ID NO: 350 - DNA, 72 bp, Homo sapiens
gccacactgtctccctaccgaagtagaatccaggccgccctttggttttcttaaagaagtccccatgggccg

SEQ ID NO: 351 - DNA, 72 bp, Homo sapiens
agaggagagggaagctgggcaaaggggatggaaggcgtccagcccgaccttaccaaaccccttgggcctcgt

SEQ ID NO: 352 - DNA, 72 bp, Homo sapiens
gttaacccctgccagccaccaaggaccagagctggcgtgaagtagaagggaaaatagaaagcttgtccaatg

SEQ ID NO: 353 - DNA, 72 bp, Homo sapiens
cagctcagggatgttcctgcgcagggcgaggtagacggttccatttggagctgggaggacagagtgccgtgg

SEQ ID NO: 354 - DNA, 72 bp, Homo sapiens
gatcacatgaccttgtagaagttgctcaaattctgcgtgctgcctttgaagtaaacagaggagccaaacaag

SEQ ID NO: 355 - DNA, 72 bp, Homo sapiens
ttgtgactcagttttagctggtagtggcttgtacacgccaggggagttttagaactgttctgaagagagatg

SEQ ID NO: 356 - DNA, 72 bp, Homo sapiens
tttttcaggaagaggaaaggatgtttttggtgcgtcggagtttcagtaggctgggttgtgcgagagatttcc

SEQ ID NO: 357 - DNA, 72 bp, Homo sapiens
aagtcaggatgctttgggagagcatggaaggtcaccgaatccagtgctgaggaactaatgaagggtttctga

SEQ ID NO: 358 - DNA, 72 bp, Homo sapiens
gcttcccgctcagctgctgagtcagctctcaaaaacgaagggctgagctcagatgaggaattcgacagtgtc

SEQ ID NO: 359 - DNA, 72 bp, Homo sapiens
gcacatgcactctaatgatgcaagctaccaccaggcggtcagctttgccagctgacgtcccaaacagctggc

SEQ ID NO: 360 - DNA, 72 bp, Homo sapiens
tgggctgctcctccctgggccagggccagaggacgcgggcaaggggggcctggctggcgagggcaccaggcc

SEQ ID NO: 361 - DNA, 72 bp, Homo sapiens
cccctgcgagtggatgaagaaactgctctcataagcgtggttatgcagatcaaagagtgggtcctctacaca

SEQ ID NO: 362 - DNA, 72 bp, Homo sapiens
ccaccactctcctgacttctatcaccttggattagcgttgcctgttccagaactacatggaaatggaaccac

SEQ ID NO: 363 - DNA, 72 bp, Homo sapiens
ctgccctggccttaaccgagagagggaaatgttgacggggaagaaagccctgcccaccaggcagccccaccc

SEQ ID NO: 364 - DNA, 72 bp, Homo sapiens
gtggaaccaaggtccagtggagagaggaacataagcgaatgaagaaagaagcaatagagtctcagtgataag

SEQ ID NO: 365 - DNA, 72 bp, Homo sapiens
tcctttactctaatttctccagctgcattttgttccgtttatctgcagaaaaagaaagaaaaaaaagaaaaa

SEQ ID NO: 366 - DNA, 72 bp, Homo sapiens
ttgcttctgtgcccgggtcccccttgattgacacacgacctgtcatctattctggtctctgaagggcctttg

SEQ ID NO: 367 - DNA, 72 bp, Homo sapiens
gaattaggtgtggttgcaaatgcatgagaatagaacgacctgtattagatgtattaagtcactgagatttcg

SEQ ID NO: 368 - DNA, 72 bp, Homo sapiens
aatgcagtcgcctaccgaggtcaggcagacagcatcgtacacaggaagccgactcattgtaagaaacacagt

SEQ ID NO: 369 - DNA, 72 bp, Homo sapiens
aaattaaaccacagagaacgtcgatttgaaactttcggagtttcggagaaactggccctagctcagctgcca

SEQ ID NO: 370 - DNA, 72 bp, Homo sapiens
acctggaggaggtgatgtggcaagaggcatcttgacgaaagcatgtgtaaaagaacatgtcagagaagccag

SEQ ID NO: 371 - DNA, 72 bp, Homo sapiens
caaaccagcgaagttcagttaataacagactccttcgaggtccctggcaagccactgacttcctctttctgg

SEQ ID NO: 372 - DNA, 72 bp, Homo sapiens
tccgggtgtggcctggaggcacccaggcaggctcccggtaggaggcggcttcctggaggaacctgtggtgga

SEQ ID NO: 373 - DNA, 72 bp, Homo sapiens
ctctctggaccttgatctctcatctgcatctttaccgttcccccaacataccaaggaaattcctgcctcaat

SEQ ID NO: 374 - DNA, 72 bp, Homo sapiens
ctgctgcctctccagacttctgccagaacattgcacgcgacagtttcaggcacagaactgactggcagcagg

SEQ ID NO: 375 - DNA, 72 bp, Homo sapiens
actcttccatgttactttcagtggcttctctctctcgtattggatagctagatgttacttctgttctcaatc

SEQ ID NO: 376 - DNA, 72 bp, Homo sapiens
tctgcgattctgggaactgactttaaacaaaatcacgaagctttgcagtgaagacacatctgactcacaagt

SEQ ID NO: 377 - DNA, 72 bp, Homo sapiens
tcctcccgagcctggtggtttagactgcagattctcgggactgacaagacaaactgtgtgaccttggacaag

SEQ ID NO: 378 - DNA, 72 bp, Homo sapiens
ggtgaggaaggtagaagaaaaacatccagagaggtcgagtagttggcactgaatgggaatagtttccaaaag

SEQ ID NO: 379 - DNA, 72 bp, Homo sapiens
gacgagtcagaggaacacctgtcccggcggcgaggcggccgcggggtggggcaggcggtgggttgtcaggcc

SEQ ID NO: 380 - DNA, 72 bp, Homo sapiens
gcgtgaaggtgttgtgtaactggcattggctgagacgagaccaacctcctgtttccggactcttatgaactt

SEQ ID NO: 381 - DNA, 72 bp, Homo sapiens
tgcgagcacaaaggggaacgtttggtcaccctattcgtatgaagctgaaatgggaagcattgggtagaagag

SEQ ID NO: 382 - DNA, 72 bp, Homo sapiens
aggaaatggaagcttgggcagtggaagtatcttgccgaggtcacacagcaagtcagcagcacagcgtgtgtg

SEQ ID NO: 383 - DNA, 72 bp, Homo sapiens
ttgccaacttcctccaggcttctgcccactgcctgcgcctaaagccaatgccatgtgtttcatattttagtg

SEQ ID NO: 384 - DNA, 72 bp, Homo sapiens
gactcacaggcagggagcggtgaggcagagctgtccgctggagcgagcccctgctctagggccatggccctc

SEQ ID NO: 385 - DNA, 72 bp, Homo sapiens
agacagtagacaaatgactcaccaactttggccatcgaggcgggctgagtcatctaaagtcagctgaatcac

SEQ ID NO: 386 - DNA, 72 bp, Homo sapiens
ctgtgtgtgtgtcctgcgcgcgtcgggagctgctgcgccacacacaggcacgcagggtgtgggcacacctgt

SEQ ID NO: 387 - DNA, 72 bp, Homo sapiens
cttggctgcaagtgaaacctagctcagactcccttcgagtaaaaggaagtgtactggctgacgtaacctgga

SEQ ID NO: 388 - DNA, 72 bp, Homo sapiens
gtcagcactctgatgtcaatgcacgcacttcacaacgctctgctccttctgtccgtcaccaaaaaacgaacg

SEQ ID NO: 389 - DNA, 72 bp, Homo sapiens
cgcctcctcacctctagggtggccttgtctcctttcgccttgggctgtgttactctcctcacctgggaagtg

SEQ ID NO: 390 - DNA, 72 bp, Homo sapiens
gaggcaggctcttgcagagaggagaggggtcggggcggtggcaggggcaggctcttgcctcatcaggctggt

SEQ ID NO: 391 - DNA, 72 bp, Homo sapiens
attttcagagctagtcctacagtgaggggagctaacgtggagtgggcgtgagaattctattcagcaagcaca

SEQ ID NO: 392 - DNA, 72 bp, Homo sapiens
gggtttgagtcccggtttctcctccacttcctagccgtgactttgcacaacaattcctctggtccctggttt

SEQ ID NO: 393 - DNA, 72 bp, Homo sapiens
aataaattattaccacagaggggagcagagagcaccgcaagaccaaaggtgagaatctaaccaatggcagaa

SEQ ID NO: 394 - DNA, 72 bp, Homo sapiens
gacttgctgattcaccaagaaacggctttgtgtaccggaggcgctgttggtcgggacgctatcatgtatgca

SEQ ID NO: 395 - DNA, 72 bp, Homo sapiens
ccccccccggggaaatggggcttgcagcaccggctcggagagcaccacgggcttcctctggcctcgggaaaa

SEQ ID NO: 396 - DNA, 72 bp, Homo sapiens
gtagacggggtacgtgccaagcatcctcgtgcgaccgcgagagcccggggagcgggggcttgccggccgtcg

SEQ ID NO: 397 - DNA, 72 bp, Homo sapiens
aacccacggccactgtgcctttggaagctgggatgcgccagaggcctccaggctgcacagtgccccctgggg

SEQ ID NO: 398 - DNA, 72 bp, Homo sapiens
ccactcatctttgtgagatgggtctcagagggccccgtccctgctgacaccaaccattcttaccggtagcct

SEQ ID NO: 399 - DNA, 72 bp, Homo sapiens
ttggggaccatgtgactgcattataactaaaaccacgttgtacggacctgccaatacatatgacaattaaaa

SEQ ID NO: 400 - DNA, 72 bp, Homo sapiens
atgcaaacaccaaaccctgcctttcttccccttcccggtggcaagagggcttttcagatcagtgatacattc

SEQ ID NO: 401 - DNA, 72 bp, Homo sapiens
gctttctttcgcagttttgcggcccaaggcttgggcgaatcagttcacatcaacacccctactagcctctcc

SEQ ID NO: 402 - DNA, 72 bp, Homo sapiens
agttactggagcgtgaagctgttccaggcacttcacgtaccaagagcaccgaggctcaggccctgcactcca

SEQ ID NO: 403 - DNA, 72 bp, Homo sapiens
aaggcatctgagcccccaccagcagaagggctctgcgccccaccctgcagagatccaagctggccagggagt

SEQ ID NO: 404 - DNA, 72 bp, Homo sapiens
gagaatcaggaaaagttctcctctcatgccgaagacgggagggaaaccagagggactggtgagccttgagtc

SEQ ID NO: 405 - DNA, 72 bp, Homo sapiens
gggtggagaggccatttaaaaggctgttgcaaaatcggttttcctgataaagagctgggctgagtcatctgt

SEQ ID NO: 406 - DNA, 72 bp, Homo sapiens
cctctcccccttccccaccaggggcgttccacatacgttgtcccgacacagcagtaccctgtgcagccagga

SEQ ID NO: 407 - DNA, 72 bp, Homo sapiens
cctgcctagggcacctaccgtaagcttggagcttacgggactgaaagttgctctgggtgagtcagtaagtga

SEQ ID NO: 408 - DNA, 72 bp, Homo sapiens
ggaagaaggggacctatttcctgaggttgttgtgacgacttggctgacaacacacggagaggatggaaccag

SEQ ID NO: 409 - DNA, 72 bp, Homo sapiens
ggagcctgcagcatgctgctttgaaggagccccaacgaatgacagtaataatggtggtcgtttttgaaacga

SEQ ID NO: 410 - DNA, 72 bp, Homo sapiens
gctccaaggctacagcaagtcccagcagagtggggcggcccagtgagatcacgtaagtgaacatgctttgtg

SEQ ID NO: 411 - DNA, 72 bp, Homo sapiens
agactacaatgtttgatctagaacttatgctggttcgtggtctttcctgggtttgatactcagtgactagtc

SEQ ID NO: 412 - DNA, 72 bp, Homo sapiens
ggcatccactctgcagctgaggccaaagtttccaacgggaagggagggtgaggcttctatttgtttcccaag

SEQ ID NO: 413 - DNA, 72 bp, Homo sapiens
accacgcagaagcttgtttggtggcatcgtgtgcgcggccgacatttacgcaggatctggctgcgttcccaa

SEQ ID NO: 414 - DNA, 72 bp, Homo sapiens
gactcacaggagttactcaataaatgtctgtgatacgagctccttgataagctgctgaaaggaggtagaaaa

SEQ ID NO: 415 - DNA, 72 bp, Homo sapiens
ctgtaagatcaagcttctcaacagctccccagagtcgtttgtccctttcagtcaccaaccacaccctaaaac

SEQ ID NO: 416 - DNA, 72 bp, Homo sapiens
tactcccaccttcttcctgatgcttgaaatctgtccgtgatcccaggtcagtgattgctcgaggctgtgaca

SEQ ID NO: 417 - DNA, 72 bp, Homo sapiens
ctacgcccccgggggaatcggcccccccagccctgcgccagaatcccctgcagcaagtttcggagcaaggcc

SEQ ID NO: 418 - DNA, 72 bp, Homo sapiens
cagacattctgtttgatgcggagaggccagccattcggctgtgattttgtagtctctggggagatatttttt

SEQ ID NO: 419 - DNA, 72 bp, Homo sapiens
agctgggagcggccgagcgggtgctgggccagagtcggggcctgtctgtgggtgaggggcacggcagcacgg

SEQ ID NO: 420 - DNA, 72 bp, Homo sapiens
ctaagcttctacaaaaatctcagccttctgatcctcgggacacgactagcaatccaacaactttgaactagc

SEQ ID NO: 421 - DNA, 72 bp, Homo sapiens
cgggaggcagaagttgcagtgagccgagataaagccgttgcactcaaacctggggtacaagagcgagacttc

SEQ ID NO: 422 - DNA, 72 bp, Homo sapiens
atgctatgaggtgcttgaaagggcctcttcttacccgacttgctctctctcatctcttcatttccttctgcc

SEQ ID NO: 423 - DNA, 72 bp, Homo sapiens
cacgcccatgtttgtccccagccacggcgtcctgacggccgccaaaggcttgagggctattcagaccaaaag

SEQ ID NO: 424 - DNA, 72 bp, Homo sapiens
gggactctgcccagagtactcctctaaatgtcaggcgctacccaacaccttaataccacatccccacaatcc

SEQ ID NO: 425 - DNA, 72 bp, Homo sapiens
ccagggctccgggacaagcttcctggaggaggcagcgtgagctctgggaggtagaggtcaagacctcaaaaa

SEQ ID NO: 426 - DNA, 72 bp, Homo sapiens
tgatacaataagcatcagaatcaccatcttctgtacgactgtgagtgactgataaatgtcttgagagtatac

SEQ ID NO: 427 - DNA, 72 bp, Homo sapiens
tcagtcctgagtcatagagagagctacttgctgcacgtccaccccctcaggggtgagtcagctcagcctgca

SEQ ID NO: 428 - DNA, 72 bp, Homo sapiens
tcacgaggttactctgaggagctaatgagattgtgcgtatgaaaacaaaagttaattgactgtcttcattat

SEQ ID NO: 429 - DNA, 72 bp, Homo sapiens
atgggaattactgttaatgccacactgtcacggaacgctacaactggaagggaccacaggaatcacccagac

SEQ ID NO: 430 - DNA, 72 bp, Homo sapiens
tagtaattcggtaaagatgattcatttctttagtccggtcttcggacttgacttcttagaagcaggtcttgt

SEQ ID NO: 431 - DNA, 72 bp, Homo sapiens
gtcacaaggagattttcctttgaaagaaaaaccaccgaagaataccatgtgtcctggcagccacttttcaaa

SEQ ID NO: 432 - DNA, 72 bp, Homo sapiens
gccagtagcctgcccttccgcagtggctaaggatccggtgttgcggtgatacatgatgtgacctcttcaacc

SEQ ID NO: 433 - DNA, 72 bp, Homo sapiens
tcagaaaacaaaaacaacgaccaaaacgaaatgcccggggggcgggggggggcttttctgcctttcttcttc

SEQ ID NO: 434 - DNA, 72 bp, Homo sapiens
ggtttgatggaggcctgcaggaaacaacagccaggcgcaaggctttgggagttgaagcatagcttctgcgag

SEQ ID NO: 435 - DNA, 72 bp, Homo sapiens
tctttttcttgatccttcttttgagtcctaagtaccgccattacagcttcaaattggcacgtcatataggcg

SEQ ID NO: 436 - DNA, 72 bp, Homo sapiens
acagctgtgagacagaaagccagggtgaggggccacgtgcagctttctgcctcccgctgcctttggaacagg

SEQ ID NO: 437 - DNA, 72 bp, Homo sapiens
tggccctgtgcccaggcagcctcctcctcctcctccgcccctcacacaccagaggttcatgaaattagtcac

SEQ ID NO: 438 - DNA, 72 bp, Homo sapiens
tactggacaggccgagtcctagaacagcacacacacggctctccagccattgagggaaggcaaatggaggtg

SEQ ID NO: 439 - DNA, 72 bp, Homo sapiens
aaggttcatgtcatcttcaactacaagggcaagaacgtgctgatcaacaaggacatccgttgcaaggtgtgc

SEQ ID NO: 440 - DNA, 72 bp, Homo sapiens
tataaattctttaggttcctttttcttgcttggatcggaatcatctgaaagggctcaggagccagctgtcgc

SEQ ID NO: 441 - DNA, 72 bp, Homo sapiens
atttccttatttacaaaacagaaataactttgcaacgttgtaaagattagcaaaattgtataggaaaggcct

SEQ ID NO: 442 - DNA, 72 bp, Homo sapiens
gaggacccctgggctcgggggtggtgagggagcttcgtcccggctgggcccgggctggggactcggcctccc

SEQ ID NO: 443 - DNA, 72 bp, Homo sapiens
ctggcacgggcccctccgggtggcggcaagggcgccggtggcccaggctcagggcctctgtctggcgccacg

SEQ ID NO: 444 - DNA, 72 bp, Homo sapiens
cctaatggtttcctggctcatgtgagagaagtcagcgtcagcagtcgggttttgccgagatattttcttgtc

SEQ ID NO: 445 - DNA, 72 bp, Homo sapiens
tgaccaatagctatgaagtcttggagttcctaggccgggggacatttggacaggtggctaagtgctggaaga

SEQ ID NO: 446 - DNA, 72 bp, Homo sapiens
tgcacgcaaatacagcccctactcatgcctcagcccggcagggttggaactaggcttgcacccctttgcagg

SEQ ID NO: 447 - DNA, 72 bp, Homo sapiens
ccagagcacccatctcttcttccaggtctgcaccacggtaaaagcgttccggtctcctgctctgccccattc

SEQ ID NO: 448 - DNA, 72 bp, Homo sapiens
agtaacagaccacagggaaggccacgcccaggatgcgcctgcaggccttgcagaggccaccactgaccagag

SEQ ID NO: 449 - DNA, 72 bp, Homo sapiens
gttaaatctattcccttaatggctctcgacatccccgctttttagtgtggaaattctcgacttgaaattgtt

SEQ ID NO: 450 - DNA, 72 bp, Homo sapiens
tgtgtttagtctaagaatgaagaaatagcagtgttcggtgaagtggaatttggtgaggcatatacaaaccag

SEQ ID NO: 451 - DNA, 72 bp, Homo sapiens
aagtggaagtgcctgagctgtgaatgcggccacagcgttcatgccagcttgttcccaagcctaggagaagca

SEQ ID NO: 452 - DNA, 72 bp, Homo sapiens
gcagcgcaggagcagcccctggagcgtggtggaggcgtcggtgaagccaggtgagccaggagggcgtgggac

SEQ ID NO: 453 - DNA, 72 bp, Homo sapiens
ggttaacagcatgcacacagctgtgcagtaagagccgcagaggtttgctgtgtctcttcatgacctgcaacc

SEQ ID NO: 454 - DNA, 72 bp, Homo sapiens
ctgcaggatgatccctgagagtgtgtcatctcgggcgcttggtggtttcccaacaagattctggggaatggg

SEQ ID NO: 455 - DNA, 72 bp, Homo sapiens
accaggctttggtgtgtgtttccccaggcttgcttcgaagggaaggctcagtgtccaaccacagctcttctg

SEQ ID NO: 456 - DNA, 72 bp, Homo sapiens
tccccacaatcagagatgctggctggctttcaacacgtgccattagtgtgcagcgcttcctttgtcttttct

SEQ ID NO: 457 - DNA, 72 bp, Homo sapiens
cggatgctacatttctcagaaaacagtggcagagccgggagagtcaagagtggaacaaaagacaagacagaa

SEQ ID NO: 458 - DNA, 72 bp, Homo sapiens
ccctcagactcctcccctgcttgctccaaattccccgggttgcatgactagaattaatgtcaccaactctga

SEQ ID NO: 459 - DNA, 72 bp, Homo sapiens
gactcttccagcttctggtgactataagcattcctcggcttgcggttacatcactccaatctccgcctccat

SEQ ID NO: 460 - DNA, 72 bp, Homo sapiens
cacttgtggcttcagggcctgctttggcccaatcacgtatttaccattgacatttgatgatgaaatcctgct

SEQ ID NO: 461 - DNA, 72 bp, Homo sapiens
tgttatctctttgggaatgctgaatacatacatttcgagaaggaaatgactgttaaactcttaagacttcag

SEQ ID NO: 462 - DNA, 72 bp, Homo sapiens
ttgaggggcttgtatagtgggagtcacaaaggactcgccaacaagacaactggtagtgctagggaggcctgc

SEQ ID NO: 463 - DNA, 72 bp, Homo sapiens
gtgggcccgagagcacgggggtcaggggtggggctcgagtctcgtcccagggctccgggacaagcttcctgg

SEQ ID NO: 464 - DNA, 72 bp, Homo sapiens
tgccgcctagtttatgtccccggtggggcacacagcggggggcgccaggttttccttgtcccccagctgctc

SEQ ID NO: 465 - DNA, 72 bp, Homo sapiens
cagagatgaagagaaatgaagagaagagagacagccgtcaagactgtccagagaagtgggctgaggcccaca

SEQ ID NO: 466 - DNA, 72 bp, Homo sapiens
gtggtcataccgagcctttcctcaccccaggtggccgtctcccagtggccctctcctgggcctgcctactca

SEQ ID NO: 467 - DNA, 72 bp, Homo sapiens
tcctctcccgggaatgtacccacaggccccctctacgcgcttgggttgcccaggaaaccccaacggtgaccc

SEQ ID NO: 468 - DNA, 72 bp, Homo sapiens
gtctctggtatttggaacacacacaagcgtggtcccgcctccacttccctaatgccctgtttaaatccctac

SEQ ID NO: 469 - DNA, 72 bp, Homo sapiens
tccttccaaagtggaggtcacttctctcccaaccccgagtcctccacccaaactcccttctcaaggtacaag

SEQ ID NO: 470 - DNA, 72 bp, Homo sapiens
gagacacactctgctgtcacatccttcagggtccccgggggccagcacggagggccatgatcatgtaaattg

SEQ ID NO: 471 - DNA, 72 bp, Homo sapiens
aatgctaactccaccctgcatttgcagagatccgtcgctcacaccttttcttgtcttccgttgaaaaaagag

SEQ ID NO: 472 - DNA, 72 bp, Homo sapiens
acaaggcacttagaggccttctcacccatgtggagcgcaggtgctgcaacagggtggagccaaggctgagac

SEQ ID NO: 473 - DNA, 72 bp, Homo sapiens
ttttgtgactgaaactcaaatgaaaagtggttgctcgtgtgttttacaagtcatgttctattgtgacattct

SEQ ID NO: 474 - DNA, 72 bp, Homo sapiens
acccgggaggtggaggttgcggtgagctgagatggcgcaattgcactccagcctaagcaacaagagcgaaac

SEQ ID NO: 475 - DNA, 72 bp, Homo sapiens
ataattgcaccatctagatcaagagggcccagatccgtgtgactcagaggagagagcaacaaccttagtagg

SEQ ID NO: 476 - DNA, 72 bp, Homo sapiens
ttaggcagtttgcccgttactgccctggtcttctgcggctgcctgacccagggctgatgcaagcccttaaat

SEQ ID NO: 477 - DNA, 72 bp, Homo sapiens
gggcactgagggtgtcagatcatcagtggtttgggcggtggtttagtacttgcctctgtcacagattctaca

SEQ ID NO: 478 - DNA, 72 bp, Homo sapiens
tggcatagtggctagggctgcagatgcctgacccacactacctgtgttcaaattcctggttcttccattgaa

SEQ ID NO: 479 - DNA, 72 bp, Homo sapiens
agagttgacaaatccctagccccgcagcctgagtccgcccaacctccaggtccccttcctggggagttcgcg

SEQ ID NO: 480 - DNA, 72 bp, Homo sapiens
tcaacctcgtcttcccatgagaccgacacggccaccgccaacatctgcggggacaatgacagaggaatgcct

SEQ ID NO: 481 - DNA, 72 bp, Homo sapiens
accaggtactgggcgtgcagctggggctgtctgtccgccacccgcctccacgcctcacttcaggctccctcc

SEQ ID NO: 482 - DNA, 72 bp, Homo sapiens
aagtcccgcaggaggctctgcaccaccgagtaccgcgactgcgagaacgaggtcctcagagactcgatccag

SEQ ID NO: 483 - DNA, 72 bp, Homo sapiens
gagatgagtgtttctgttgccacatgtccaagccacgaagtgaaaaacagagttggaagccaagatgtgggg

SEQ ID NO: 484 - DNA, 72 bp, Homo sapiens
gatgccgtgctgcctggacgtggggagacaaagctcggcctgctcaccaagccacagtgtgcccccacgctg

SEQ ID NO: 485 - DNA, 72 bp, Homo sapiens
ttgagctttactgacactgttctttttctagctgacgtgaagatgagcagctcagaggaggtgtcctggatt

SEQ ID NO: 486 - DNA, 72 bp, Homo sapiens
ggcggcccctccacagggcccctctcctgcctggacggctctgctggtctccccgtcccctggagaagaaca

SEQ ID NO: 487 - DNA, 72 bp, Homo sapiens
cagtgctgggaagaccccagcaccacctccaggagcggggggatagagaagccttaaaaggcaaacatggcc

SEQ ID NO: 488 - DNA, 72 bp, Homo sapiens
tatttccgcttctcgcagtggggcagggtggcagacgcctagcttgggtgagtgactatttctttataaacc

SEQ ID NO: 489 - DNA, 72 bp, Homo sapiens
caaaaaagagtaagtggctcaatagtccccaagggcgtctgcatcctcaggaacagcaacattgaatcatca

SEQ ID NO: 490 - DNA, 72 bp, Homo sapiens
gaaggcagagttggggtctctgcaacgtgatttaccggggcatcttgcaaaggagttgctgtgacagtaagc

SEQ ID NO: 491 - DNA, 72 bp, Homo sapiens
aattgtaacttggaactggctgtggccagcctccacgtgaccaattttgtaatttattattaactttatgca

SEQ ID NO: 492 - DNA, 72 bp, Homo sapiens
tttcaacaaagagaaagggtgctaaaagtcaccaccgctctgaaagagaacttgagaaactggaagacttcc

SEQ ID NO: 493 - DNA, 72 bp, Homo sapiens
aattcgaagtgggggcgcgttcgaggggttctgggcgagtctcaaaaaaggcagggtcaaagttaataattt

SEQ ID NO: 494 - DNA, 72 bp, Homo sapiens
tctttaaaaaaatcaatcaacaaatatttattgaacgtttccttgtaggctttaaaatccacccataggctg

SEQ ID NO: 495 - DNA, 72 bp, Homo sapiens
aaggtgcttgcattccagtacacatgtgcctgttgcggcacagggtggagacattaaacaagcagacaatat

SEQ ID NO: 496 - DNA, 72 bp, Homo sapiens
taatactacttacctactcctactgaagggtgagacgcagcaggcaatgcgcttagcacagggcctggaaca

SEQ ID NO: 497 - DNA, 72 bp, Homo sapiens
gcgactctgaagtgctgagttgtcctgtgctgtaacgcggggcctgttacccctctgggagaggagactgtg

SEQ ID NO: 498 - DNA, 72 bp, Homo sapiens
ccttttcactctagcccttcttaggcatcccaatgcgagtagtaaaacataaatcatgcaatatcataagat

SEQ ID NO: 499 - DNA, 72 bp, Homo sapiens
atgcagtcagccattcacgtgatcgagagctgagtcggagatgtgcagcccaaataccacaacgactcgctg

SEQ ID NO: 500 - DNA, 72 bp, Homo sapiens
gctgtatcttctaaggactttgagaggcctacgcccgagccctcccctcacagagtccccgccttctctctc

SEQ ID NO: 501 - DNA, 72 bp, Homo sapiens
ggcccagcacagtcacctacttttccctaccatgtcgccacaaaccactctctcaacacagcccgccaaggc

SEQ ID NO: 502 - DNA, 72 bp, Homo sapiens
gagccaaaaggaacccatttcgtctagttaagagacgaggcaaagcggtaaaatggtgacaacacgtcctgg

SEQ ID NO: 503 - DNA, 72 bp, Homo sapiens
gggaacaagaaaccgtgcaaggaaactgtttatttcgaaaggattttgcaataaacatagtgaataggctcc

SEQ ID NO: 504 - DNA, 72 bp, Homo sapiens
aggagctaccagcgtctgtctacacctgggtgagccgtactggtcgtagtggccccaccctacaaggatgcc

SEQ ID NO: 505 - DNA, 72 bp, Homo sapiens
ggtggcccaagggaggctcagaagggaagtggctgcgggagtggaggcttgctctagaggcctcacgccatt

SEQ ID NO: 506 - DNA, 72 bp, Homo sapiens
tcagcagcgtctcccatgtgtgctcaaaagttggacgtgcctccagcctaccctccaaagcagttgccatag

SEQ ID NO: 507 - DNA, 72 bp, Homo sapiens
atctatctctggaaatagcacctctctcctggttgcgtggagcaggggaagaaaacctttcagtaaaagaga

SEQ ID NO: 508 - DNA, 72 bp, Homo sapiens
gacctcgtcagggaggcgtctccttgtgggtggcacgtgggcatgtgttgctctgagggctgtggccatgtt

SEQ ID NO: 509 - DNA, 72 bp, Homo sapiens
aggggacctgcaggtcaggccaagcagagtggctccggctatgcccccgagcctgcaggctacgccacggtc

SEQ ID NO: 510 - DNA, 72 bp, Homo sapiens
tctgactggctcaggcagctggtgagaacagcgctcgtgtcatcagccagactgcgccgcctggagccgggc

SEQ ID NO: 511 - DNA, 72 bp, Homo sapiens
aagtatttactagatgacattgaagattccagattcgtcatgtgtcatctctgaagtcaatgtccactgagt

SEQ ID NO: 512 - DNA, 72 bp, Homo sapiens
ttttgcatttccagcagctgtgcaccgggttccgacgtctaccctcctcgtcaacacttgtcagtttctgtc

SEQ ID NO: 513 - DNA, 72 bp, Homo sapiens
ggggaagcctggtcagagacagacaggcctaggcccgaggaggggaagacctacagggaaggtggttccttc

SEQ ID NO: 514 - DNA, 72 bp, Homo sapiens
ttcccagggcttgcagcgacattgaggcatctgcccgcctgtccgaccacccgggaggggggtaagatttga

SEQ ID NO: 515 - DNA, 72 bp, Homo sapiens
cggcgagtgttaccagatctcctgcaggggagaaacggtcacgaaacatgaactggtctgccctgctcttgg

SEQ ID NO: 516 - DNA, 72 bp, Homo sapiens
gaggctggcgtgctagccctgaggcattgtgggttcggggtgaggaatgctggcctcccacggcaggccagg

SEQ ID NO: 517 - DNA, 72 bp, Homo sapiens
cggtatgcacaggagtgcgcaggtggccccggaggcgctcgctgccaagactccccacccccacccagccca

SEQ ID NO: 518 - DNA, 72 bp, Homo sapiens
cttagcttccccagctggtatcttaataggtcacacgtcccaccctccaactcaatctactggctttgagcc

SEQ ID NO: 519 - DNA, 72 bp, Homo sapiens
tgagtcatggatattgtgttaaatatataagcgttcgctggctttctttgaaatgttttctcatctaaactt

SEQ ID NO: 520 - DNA, 72 bp, Homo sapiens
cgatgcgcagctcatttgcttaaatttgcagctgacggctgccacctctctagaggcacctggcggggagcc

SEQ ID NO: 521 - DNA, 72 bp, Homo sapiens
gaagatagaagcttcctccagtgaagcagcagccccggcactgggcctgcagtggagaccgggaatgagaga

SEQ ID NO: 522 - DNA, 72 bp, Homo sapiens
tattcagccagtactctttccaggttatagctaaacgtcagttggcaacctctatgctgtggtttattgagt

SEQ ID NO: 523 - DNA, 72 bp, Homo sapiens
caacttttggttctgagtcaatctctctctctccccgggccctacaggaacacaagagtgagtcctggagcc

SEQ ID NO: 524 - DNA, 72 bp, Homo sapiens
cataccggcagtagcctcattcatctcatttttttcgattgcatcattttctcttgtgcttgatttaatctc

SEQ ID NO: 525 - DNA, 72 bp, Homo sapiens
cgctaggcccaggggcggcgccgctggaggccgggcgcgcgggccctactcggcagggcctgctcggggccg

SEQ ID NO: 526 - DNA, 72 bp, Homo sapiens
gtagtggtgatggttgcacaactctgtgaatataccgagaacctttgaactgtacactttaagtgggtgaat

SEQ ID NO: 527 - DNA, 72 bp, Homo sapiens
aagaacccactacattgcatagttccttccaaatccgctccagtgcttgctgggaaattaacaacttgttct

SEQ ID NO: 528 - DNA, 72 bp, Homo sapiens
tgtgcattaggcagcgctgttctgcctgcagggaacgattgcacaactgataacttgggcctaggctcagct

SEQ ID NO: 529 - DNA, 72 bp, Homo sapiens
ctcctctgtttcacagatgtggaaatgatggccagcgaggtcacagtctgaccagccaagaccaaaacctac

SEQ ID NO: 530 - DNA, 72 bp, Homo sapiens
gtgagtactcctgccccttcacgggccaacaggagcgaggtcggccctgcctcaaagggcctgtgatccccc

SEQ ID NO: 531 - DNA, 72 bp, Homo sapiens
ggcgtagcctgttgtcctacttttagtgctaagaccgatcagtgtgttaaggttttagtgctaagattgatc

SEQ ID NO: 532 - DNA, 72 bp, Homo sapiens
cggctccaaaaaatattaaaaaaaaaaaaaaaacccgcaagtttgatgatctaacttctaaatctgtgtaca

SEQ ID NO: 533 - DNA, 72 bp, Homo sapiens
aatgcctgcccaccagcgttgcacttctaccagcacgccctgcacccagaggcaaagtgcctctgcctgggc

SEQ ID NO: 534 - DNA, 72 bp, Homo sapiens
ggaattgtagtccttttccgtaaagagtcaccatgcgtcagctgaaagaaccacatttcccaagaatccgtt

SEQ ID NO: 535 - DNA, 72 bp, Homo sapiens
gaaggaatgtgaggaagggagggccagaggtgaaccgtgccagtgccatggcgacagatcactggacagggc

SEQ ID NO: 536 - DNA, 72 bp, Homo sapiens
tatggttgggccctgacgctaccaccattcttctccgtcccccctcccccaagctggcgcctactatccagc

SEQ ID NO: 537 - DNA, 72 bp, Homo sapiens
gcttttttgtgctgggagaattgagagaaaagagacgtaaacatcaggaacctttgcacagggtgtctagtc

SEQ ID NO: 538 - DNA, 72 bp, Homo sapiens
tttacagcagagacagaggcagtgcgctgcctgcacgtcttggaattagctgagctgtgagggtgcagcgag

SEQ ID NO: 539 - DNA, 72 bp, Homo sapiens
acaggctgggactggtggaagcaccaccacagcagcggcaaagactgggattagagctgagtctctcctccc

SEQ ID NO: 540 - DNA, 72 bp, Homo sapiens
aaagagctgggattacaggcgtgagccaccgcgttcggcgaaaacacacattttctaagaaactgattgctg

SEQ ID NO: 541 - DNA, 72 bp, Homo sapiens
gagggcaatccatggggacctaccctgagacaggccgcgatcaagaaccctcagcgtccccagagcaaccca

SEQ ID NO: 542 - DNA, 72 bp, Homo sapiens
tggggagtcagcctccttcagccccaagaggctggcgtgctagccctgaggcattgtgggttcggggtgagg

SEQ ID NO: 543 - DNA, 72 bp, Homo sapiens
gttctggctcaaggcagggagttgggcaggggcctcggggcaggaagtgaaagaagtagtcactaagcctga

SEQ ID NO: 544 - DNA, 72 bp, Homo sapiens
cagtctacctctctgggccctggtcaggctgagctcgtgccaaccatgcctcccatgtcccatttaggttcc

SEQ ID NO: 545 - DNA, 72 bp, Homo sapiens
tccctttggaaagtgctgttttcttgctttttttccgcctttccattgtgtcagacttataaggcaatcagc

SEQ ID NO: 546 - DNA, 72 bp, Homo sapiens
aaagcaattgaaaaggtctatgcaataaaggcagtcgcttcattcctctcagaccttctgcccttcctccat

SEQ ID NO: 547 - DNA, 72 bp, Homo sapiens
gatcaaagataaaaaccaacataaacagtgacacccgtttgtaaacaagccagtgtttaaaatgctgcagtc

SEQ ID NO: 548 - DNA, 72 bp, Homo sapiens
acttcgtttccagagaaccctgaacagccttctgccggtcacagatgagacagggatgaggaaatgccgcta

SEQ ID NO: 549 - DNA, 72 bp, Homo sapiens
atgcgtaatataattcataacacatgacaggtgctcggcctctgtgtgtgtagcaagctctgacaaggaagg

SEQ ID NO: 550 - DNA, 72 bp, Homo sapiens
agcgggactttgtgtcccgcctgtggctcacataccgccgggacttcccgccccttcctgggggctgcctga

SEQ ID NO: 551 - DNA, 72 bp, Homo sapiens
gaaagtggtgttggctctcagagggtgaggctgaacggcagtgaatgcccttttttggttttaatttgggga

SEQ ID NO: 552 - DNA, 72 bp, Homo sapiens
gaggcctctgttggagtgcctgaaatgtctggcttcgggaccttggattctttaaatgatgcaatctcctgg

SEQ ID NO: 553 - DNA, 72 bp, Homo sapiens
aagggaaactttgctttttttttttttttttgagacggagtcatactctgtcgcccagcctggtgtgtgtgc

SEQ ID NO: 554 - DNA, 72 bp, Homo sapiens
gaagcagctggaccattactgcagttctgagggtgcgtcacaaatcaggtcatagctctgggtagagtccac

SEQ ID NO: 555 - DNA, 72 bp, Homo sapiens
gccccaaggcctggtgccctgctgacgggcaccaccgtggccaacctccaggtggcccggctcgtaagtgtc

SEQ ID NO: 556 - DNA, 72 bp, Homo sapiens
gtgcagaagggctatgcaagacaggcccagagagacggaagaaggctggtcccatcaacagctgggatgggc

SEQ ID NO: 557 - DNA, 72 bp, Homo sapiens
aaccagcctagctgacttcaagatactgggctggccgggccatttcctggggagagaggggaagtatgatct

SEQ ID NO: 558 - DNA, 72 bp, Homo sapiens
ggcaggtaggtctgccccccatcactattgggcatcgggtgagcactgatgagcattttggacttaggagat

SEQ ID NO: 559 - DNA, 72 bp, Homo sapiens
gagaacatgttgcttcatcctgccctgctcagccccgtgggttctcttggcttctggtgacctggggtgcac

SEQ ID NO: 560 - DNA, 72 bp, Homo sapiens
gaggtggccagggcaccactggagcagagtggaggcggggtgtggaggtcagaaagcgaatatggtgcgcgg

SEQ ID NO: 561 - DNA, 72 bp, Homo sapiens
aggggtccttgcaagggatgctggcagcttggacccgagtggtgggatgcagatggaagaggcaggtggaca

SEQ ID NO: 562 - DNA, 72 bp, Homo sapiens
gctgctgccgatgtgacttccgggcaggccctcctcgtgtctcctgcctgaaaccccggcattgtccccgct

SEQ ID NO: 563 - DNA, 72 bp, Homo sapiens
ccacctcctccaagcagcccccccagccaccccaccgcagggagccatcctgcaaggggagtgcacacagaa

SEQ ID NO: 564 - DNA, 72 bp, Homo sapiens
gggtctaatgaccctcgagtcaagaacaaccctgacggctgccctccctcttattcggcccaaggacttgaa

SEQ ID NO: 565 - DNA, 72 bp, Homo sapiens
tccgactgatggctgtccgggttaaagcggtacgacgggagctgctctatgtctgctttggtgagaccccgg

SEQ ID NO: 566 - DNA, 72 bp, Homo sapiens
tggtggacgaaggagatggtgagtgcgtcctcttccgtcctcctgggcgtgcaggccgtgcagggaggaagc

SEQ ID NO: 567 - DNA, 72 bp, Homo sapiens
tttggtttggaatagggaaaaaggtaagagactaacgtggaaaggtgctaactcagagactggagattatag

SEQ ID NO: 568 - DNA, 72 bp, Homo sapiens
aagggtctgtgcattctgtttcttctgcctggagccgcacacggctggctgccccggaacctcactttttct

SEQ ID NO: 569 - DNA, 72 bp, Homo sapiens
gagacttctcttttcttacctcaggtttattacaacgcaacttttaagaacttgagctattccaggcagaag

SEQ ID NO: 570 - DNA, 72 bp, Homo sapiens
gccaggaagcccacagcataggctgtttgtgttggcgggcctccctacctcctcaaagctgcctcagagccc

SEQ ID NO: 571 - DNA, 72 bp, Homo sapiens
gaatcggtcttcatgatcaaaacccaccgggaggccgtctgcggaccgcgcaccttcgcagcgtgctcctca

SEQ ID NO: 572 - DNA, 72 bp, Homo sapiens
aacgctgccgtcggtttggtttaacagccacaagccgtcgtttattccgctacttccaattcctctacagaa

SEQ ID NO: 573 - DNA, 72 bp, Homo sapiens
tctgatcccctaatccatttatccagagtcccgagcgcaatggctggtgcggggacacaacggcaggaggtg

SEQ ID NO: 574 - DNA, 72 bp, Homo sapiens
tgaaggaggaagagaggctacaggaatctgccatccgggagaccctgtctctaacgggccatacggggtccc

SEQ ID NO: 575 - DNA, 72 bp, Homo sapiens
tggaattgcacaacctggagccttcctaacatcagcggcttcatactggcatttccattgtggtgcagcaac

SEQ ID NO: 576 - DNA, 72 bp, Homo sapiens
gcgttgaaccgagaattgcaacacaaggccgggcacggtgactcacccctataatctcagcactttggggag

SEQ ID NO: 577 - DNA, 72 bp, Homo sapiens
cactgaatcaatccattctttgatcactggcagcacgttcttcctagatgcaagatcatcccttcctcccca

SEQ ID NO: 578 - DNA, 72 bp, Homo sapiens
aagctagggccagcctcccagctcgccttcctgcccgcctgctcctgaccctgatcctggaacccccaatcc

SEQ ID NO: 579 - DNA, 72 bp, Homo sapiens
tagatggggccaagctgaggtcacttgctgtgtgacgtccattggagtggcagcagttgaggggcacaaact

SEQ ID NO: 580 - DNA, 72 bp, Homo sapiens
acaaggtttccaccccagtggaacgcacagcctaacggaaagacagatcagtaaacaagtaattacaacagt

SEQ ID NO: 581 - DNA, 72 bp, Homo sapiens
aatgcccagggaaccgactaactgcctgctagctgcgtcctcctccctccaggccacagcactgctctccac

SEQ ID NO: 582 - DNA, 72 bp, Homo sapiens
gccgtgacctctgggaggatgcatgtttttaagaacgactctcccggcctaacgcaaggaccttcgccctgt

SEQ ID NO: 583 - DNA, 72 bp, Homo sapiens
ggcagtctgggctggcgccggcgggggcggggcggcggcagcgggcggcggcgggggaagtgggccctcgaa

SEQ ID NO: 584 - DNA, 72 bp, Homo sapiens
gattgggagccaaagcagaaaaccagtcagccccacgagcaggaattacctgtttctcatcaactccacttg

SEQ ID NO: 585 - DNA, 72 bp, Homo sapiens
cccccggctccccagtgccctcaggcctgtgttcacgctcctctcgactgctccgagcccgggcggacctcg

SEQ ID NO: 586 - DNA, 72 bp, Homo sapiens
cagtaccacggtgtttcggggcaatccagaggaggcgcggcgcggagcgcggccagaagccagtagagagcc

SEQ ID NO: 587 - DNA, 72 bp, Homo sapiens
ggggaggtgaaggaaattattacaaaatttttgtacgtgatgaggagacagcctctggacttccccaaatat

SEQ ID NO: 588 - DNA, 72 bp, Homo sapiens
aggaaagatgagcagccagccaggggcctcgactccggcaaagctagccagggctgctctaaagagccaggt

SEQ ID NO: 589 - DNA, 72 bp, Homo sapiens
tcattaagatgggcacagggtgggagggcttccagcggaccctgaaggaagtcgcctacatcctcctctgct

SEQ ID NO: 590 - DNA, 72 bp, Homo sapiens
ttgtcttaaacataatttctgaatatagtttgaggcgtatgtcactttctgttgctttaaagagtggagtgt

SEQ ID NO: 591 - DNA, 72 bp, Homo sapiens
attacataatcgggatttgctaagagtttacttttcggtatggaagactggaaaagagaaagaaatcttagg

SEQ ID NO: 592 - DNA, 72 bp, Homo sapiens
tgtgtattcatgtatttcaaacttgtgaagaggaccggtgccatatctgtgccgtgacttaaaagcacgacc

SEQ ID NO: 593 - DNA, 72 bp, Homo sapiens
cctccaagctggaggcttgaaaactcaagggcaggcgcctggtccagcgattcggaaaccgagatgcaaagt

SEQ ID NO: 594 - DNA, 72 bp, Homo sapiens
ttaaccacaaactctgtattatggttttagctccacgttctctgcccttctcctctcctgctctgttgaaac

SEQ ID NO: 595 - DNA, 72 bp, Homo sapiens
cctcacccagaccttgccttcctcctctgtcccttcgtccccagtccagaccacgcccttgagccaagctgt

SEQ ID NO: 596 - DNA, 72 bp, Homo sapiens
tgctgggagggggcgctgctacacggccgacctgtcgccaggagagaagcatggcgccctgcccacccactg

SEQ ID NO: 597 - DNA, 72 bp, Homo sapiens
aacaagaatccccacagcgtctccacgtggctgcacgtagccgagggagatcacgcccaggattcctgcagg

SEQ ID NO: 598 - DNA, 72 bp, Homo sapiens
atgaattaggaaattaaatactaggggaagcagttcggaggagaccaaaagacaagaatatgcctaggacag

SEQ ID NO: 599 - DNA, 72 bp, Homo sapiens
agggacttaccatcaggcctgagaaagaagtcaggcgtgcttggaatgcaattgcaaaagaggttacaagag

SEQ ID NO: 600 - DNA, 72 bp, Homo sapiens
gaggaagtggcctctgtgtggcttgtccaaccctacgtcattccatccaagtactactgcttcagggcagaa

SEQ ID NO: 601 - DNA, 72 bp, Homo sapiens
ctcactgcagcctcgaactcctgggctcagcctcccgagtagctgggggtacaggcccatgtcataacaccc

SEQ ID NO: 602 - DNA, 72 bp, Homo sapiens
gggcggggggcggctgcgtcagcgaatggtgtggacggcgcataaacgtggatgtagcgaatgataaggcag

SEQ ID NO: 603 - DNA, 72 bp, Homo sapiens
ggggccaaggccagagctggacaccacgactgccacgtaagaggaatcccaagcatactgcgatcaagggaa

SEQ ID NO: 604 - DNA, 72 bp, Homo sapiens
acgtgaaattctgtcgcttgttgcagctgacagcacggctgtgaggtcccagtgggcagaggcctcgtgcag

SEQ ID NO: 605 - DNA, 72 bp, Homo sapiens
tgccagggaggccgagagagccctgctggcagaggcgggagggggtgcgagaggaagggacagcaggcgggc

SEQ ID NO: 606 - DNA, 72 bp, Homo sapiens
tctggctgtgtcgagcgagaagtgagctcagtgctcgtctgcagtgaagggtggcccaggcttccgcttcct

SEQ ID NO: 607 - DNA, 72 bp, Homo sapiens
ggcctgtgtcccttgactcaccctctcctgttggacggcatttgatgtcgaaagggtgcctccatttcagct

SEQ ID NO: 608 - DNA, 72 bp, Homo sapiens
tggatcatgtgggaagccacacactggccctgagacgaggaattattaggatggaggggaagcacaagagtg

SEQ ID NO: 609 - DNA, 72 bp, Homo sapiens
tacaggggaagacagcagatccatacacaaagaaacgcagtctcaaactggataagttgtgtaactgggtag

SEQ ID NO: 610 - DNA, 72 bp, Homo sapiens
cggtgtttcccatgccgctgcttgcccctgggaagcgttggctctgcctcggaagaagttagcgccaagatg

SEQ ID NO: 611 - DNA, 72 bp, Homo sapiens
tgtaactgccctgaattagttcttcccagccagggcgtgcccagcatggacctgggtccaggggaggtaaag

SEQ ID NO: 612 - DNA, 72 bp, Homo sapiens
gcagggcctggagcacgtgcaaggaacagagttcccggctctgcacactcaacatgtgtgtttcatactgtc

SEQ ID NO: 613 - DNA, 72 bp, Homo sapiens
tgggaatgtgggttaccatgtttcgtcagcatgatcgctgtgatgggagagggaggattaggagggccgacc

SEQ ID NO: 614 - DNA, 72 bp, Homo sapiens
gtcccaccaaagaatcgaagctggtgccagctctccgactcctacccagcaacccgccccaggtggccagca

SEQ ID NO: 615 - DNA, 72 bp, Homo sapiens
gctgggagactagaggacaggttataccactgaaccgtctgcagatattccccagcaacagtctggggtgcg

SEQ ID NO: 616 - DNA, 72 bp, Homo sapiens
gagccagctggccagcacgcagagccctgaggccacgccacgggcacgcaggggcaggacctcagacatgag

SEQ ID NO: 617 - DNA, 72 bp, Homo sapiens
cagctcttcgcccctcacctctttgaaactctggacgtatttatggctccacctccccacctccctcccccg

SEQ ID NO: 618 - DNA, 72 bp, Homo sapiens
gcgcaggaaacgattcaattcaattcaaccgtgtgcgctggttttgtacactgcttttggactgaaatgagt

SEQ ID NO: 619 - DNA, 72 bp, Homo sapiens
ggaggagaaggaggagttggtaggggtggcatacacgtaggaaggcccgaagcaggaagagttgtggcttag

SEQ ID NO: 620 - DNA, 72 bp, Homo sapiens
ccccagggtaaaacgtggcccgggccctggggcctcgcaggccactataggaggcagaacagtaaacagatc

SEQ ID NO: 621 - DNA, 72 bp, Homo sapiens
gacttacatctgtacaaaaatctgaagtgcagtaccgatactaatgcggtgacatcagcaaggccaaacagg

SEQ ID NO: 622 - DNA, 72 bp, Homo sapiens
gatgggccatgccagcactgtgctgagcatgcatacgacattaaacacaaccctccctcaggcagctctgct

SEQ ID NO: 623 - DNA, 72 bp, Homo sapiens
cacagacaccaagtgaccttgtgcaaggcacctcacgtattgcctcgccttcttgacaccccctaatgaatg

SEQ ID NO: 624 - DNA, 72 bp, Homo sapiens
cgttgcctagaggaactggggagcctggaaactcccgaagaagactgagtgggtagatgcacctgagcccca

SEQ ID NO: 625 - DNA, 72 bp, Homo sapiens
gagttcagatatccaggacgctccaggctttgacccgcgatggtgagcaagggttcctcttccttttcctat

SEQ ID NO: 626 - DNA, 72 bp, Homo sapiens
gtgttggccgcggaactgcaggcttggggcctcggcgtccctgtcttgagcgatcccgttaggccaaacacg

SEQ ID NO: 627 - DNA, 72 bp, Homo sapiens
accatccaattacttaacttctctgcctaggggttcgcttcccacccatcccctcctccaaggcatcttagc

SEQ ID NO: 628 - DNA, 72 bp, Homo sapiens
ttctagcaggagagaatttccggaaagcagttttccggggttcaggctactgccagatggcccacaccccct

SEQ ID NO: 629 - DNA, 72 bp, Homo sapiens
acccagtgtggcccctacaagtcttagttccttggcggaggggaagtccccactttgggacaaggccaactg

SEQ ID NO: 630 - DNA, 72 bp, Homo sapiens
tcagaacattatttcacaagcaggtattgctggcacgttgtttgtgtcacgtttagattccgattaaatgac

SEQ ID NO: 631 - DNA, 72 bp, Homo sapiens
ccccaatgagagaagaatggctgtttccagccttccgggcccctcagctttgggctcctgcagggccccaga

SEQ ID NO: 632 - DNA, 72 bp, Homo sapiens
ccttcaccccgtacagtctccggtgcagagatggacgagctgggggactcaggcaatttcccccacaaagtg

SEQ ID NO: 633 - DNA, 72 bp, Homo sapiens
ccgaatccaaaaatatgaagccggggcccatctgtcggccaactgatgagcgcaaatgagctctggatttca

SEQ ID NO: 634 - DNA, 72 bp, Homo sapiens
tctgcggccgccgagatgggaagtgggccctggagcgggcttgccgagcctacgaccggggctgggatgttg

SEQ ID NO: 635 - DNA, 72 bp, Homo sapiens
agggccactgccacgggggcagcctggatggagggcggtcatagtccgtccgtgtagggagcgcagcccccg

SEQ ID NO: 636 - DNA, 72 bp, Homo sapiens
tgaaggaaatgtttaaataccaatatctctttggccgtcttagaggcctcccaagaacaaaaataaaggaaa

SEQ ID NO: 637 - DNA, 72 bp, Homo sapiens
tgcattggaatgcctgcagacagacctgcacgtctcgaggcattggaatgcctgtagacagacccacatgtc

SEQ ID NO: 638 - DNA, 72 bp, Homo sapiens
atcagttacacagcctcctagaaagtgaaaagtgccgttcacaaaaacaaagcagcgaaaggatccagaagg

SEQ ID NO: 639 - DNA, 72 bp, Homo sapiens
acagccgtgcaggccatccaccagcgcctccggtacgcctgttgcagcgtgggggccatgctggccccgagc

SEQ ID NO: 640 - DNA, 72 bp, Homo sapiens
ggccaccgtggcagccgggcccctgatgcaatccacggctgtctggcagcatgacctgccccggtcagcctg

SEQ ID NO: 641 - DNA, 72 bp, Homo sapiens
cgtggggatgaagcccgcgggatgcaggattcccacgagacctgtgctggccactgtgcggggtggggggct

SEQ ID NO: 642 - DNA, 72 bp, Homo sapiens
gccctccaatccattttctttatactggtggctttcgccttcctgttagtcattgctatttcatcatagcct

SEQ ID NO: 643 - DNA, 72 bp, Homo sapiens
ggctgctgttaggatgaatggcaggggatcaagcccgccagtgacaatgcagagagtgagtgcagagggagg

SEQ ID NO: 644 - DNA, 72 bp, Homo sapiens
aaaagagagccttaggactgagggctgtgatcccccgtttcccacgccggcagcaggcctggctgtgtcagg

SEQ ID NO: 645 - DNA, 72 bp, Homo sapiens
aggttaggtcgggcaatgttcctgcaagacaggcacgtgggctggcttctgagaacataggaactggaaaag

SEQ ID NO: 646 - DNA, 72 bp, Homo sapiens
tccagaaggaccacagctcctcccgtgcatccactcggcctgggaggttctggattttggctgtcgagggag

SEQ ID NO: 647 - DNA, 72 bp, Homo sapiens
gaggcttccgcccaccagctccatgtccccacatccggctccccacaggggtgtgtccccaccccatgctgt

SEQ ID NO: 648 - DNA, 72 bp, Homo sapiens
attgcaagggtgaggcaacaccccaaggtgtgggccggacggagctgccacagacatcctcccctgctctgt

SEQ ID NO: 649 - DNA, 72 bp, Homo sapiens
aacaggaaagggcttctgcctctccagcccacacccgagccacctcctgacccctggctgcaaaagcaggaa

SEQ ID NO: 650 - DNA, 72 bp, Homo sapiens
agctggatacagtcctactcccgcttggggagcagcggaagagcctgtggctccctacttctgactcgggag

SEQ ID NO: 651 - DNA, 72 bp, Homo sapiens
ggctggtgggagggtttggtgccagaggcatccgtcgggtgaggagcaggacctcccacggtgaacatggtg

SEQ ID NO: 652 - DNA, 72 bp, Homo sapiens
aaagggccggggccaggccaaaaaggtcgtctccacgcctgtgccacggcccagctctccacagcccacggc

SEQ ID NO: 653 - DNA, 72 bp, Homo sapiens
cctaggatagcaagatttgactggaccctgactgacgagattactatacctaaagaaagaacgcattcgtga

SEQ ID NO: 654 - DNA, 72 bp, Homo sapiens
tcttaactgtccccgctctccaatcttagcagcggcgcccagcccctaatcctgtgggctgccccgtcctcc

SEQ ID NO: 655 - DNA, 72 bp, Homo sapiens
gctcctccactggagacccggggctggctgtgcgccgacaggcaagcgcatctgctaccctagagccggcca

SEQ ID NO: 656 - DNA, 72 bp, Homo sapiens
agtataggggtggggtggaggctggcctggtcagacgtgcaaacaggatttcccccaaacagggaggctctc

SEQ ID NO: 657 - DNA, 72 bp, Homo sapiens
cacatgcacacctccagactatcacacgtgcacaccggcacgcacagacacccgcacaggtgcccagccagg

SEQ ID NO: 658 - DNA, 72 bp, Homo sapiens
tggcctgggcagcgatgagagcggccagcatactgcggccggggggcccaggggcgcagaaggagactcgca

SEQ ID NO: 659 - DNA, 72 bp, Homo sapiens
cagggcctggcatacagtacgtgctggatcaatggcggctgctggaatcactacctcctccatgataaacac

SEQ ID NO: 660 - DNA, 72 bp, Homo sapiens
tcttctattggataaacgccttccctggttggcctcgtttctctcaggtcccttgtttcactttgtgtttcc

SEQ ID NO: 661 - DNA, 72 bp, Homo sapiens
cacctttaatgctgctgcttcccaacctgggcctccgcacccagtcatcttcctttttagccagtcttagca

SEQ ID NO: 662 - DNA, 72 bp, Homo sapiens
tgggctgatcctaggtgggaagcgcaggcgcaggccgtctaagggattgatggatgtggcctgccagggctt

SEQ ID NO: 663 - DNA, 72 bp, Homo sapiens
ctgtgcctggtaacgatcgttctcacagtcatggccgtagggaaggctctttgtggttcctgggggacttcg

SEQ ID NO: 664 - DNA, 72 bp, Homo sapiens
cctgccaggccctcctgctgctgctcgcggtcgctcgccaggaaaattttatgtggcatgtcccctaaaagc

SEQ ID NO: 665 - DNA, 72 bp, Homo sapiens
aagagctcagtcacagggtactgagactggtctgacgctccagttcttcaaatcttttggagactggcaatt

SEQ ID NO: 666 - DNA, 72 bp, Homo sapiens
tccatcagacattatgaaattaaaaggagcacagacgcagtccagagaaaaggtgcttgaaaaaattcagtg

SEQ ID NO: 667 - DNA, 72 bp, Homo sapiens
aagccgccctgcagcggggcaagcaggatatggcacggcagctgcgtgagtaccaggaactcatgagcgtga

SEQ ID NO: 668 - DNA, 72 bp, Homo sapiens
ttttttgagacagggtctcactctgtcacccaggccggagtgcactggcacaatcagggctgactgcagcct

SEQ ID NO: 669 - DNA, 72 bp, Homo sapiens
acttcctctggtgaaatcctgccttcctgtccccacggcccctcagctgatgccaccttactctggagagga

SEQ ID NO: 670 - DNA, 72 bp, Homo sapiens
gcatttgtccctgaaagcatcctgtggtaaatcaccgctcttgcatattcagaagtcgtcagtttcataagc

SEQ ID NO: 671 - DNA, 72 bp, Homo sapiens
ctcaaggttagtacatgcatatgcatccccaagatcggcctgggtaagagggtggtcagagccttgtagtct

SEQ ID NO: 672 - DNA, 72 bp, Homo sapiens
cagtggcggagaggccaccactgtctcaggagcttcgtccctgcacgtccggtctcctcccagacctgcggc

SEQ ID NO: 673 - DNA, 72 bp, Homo sapiens
cggcgtctccaggaaacgtgaataggccctttcttcggagggcacagaacttcaggatcagggcccaatgga

SEQ ID NO: 674 - DNA, 72 bp, Homo sapiens
atcctgcagtgagcagtgatcccaccactagactccggcctgggtgacagagtgagaccttgtcttaaaaaa

SEQ ID NO: 675 - DNA, 72 bp, Homo sapiens
tttcgtaaactcaaaagccctctgtggccctgccacggggacgtcatctctggcgatctgaaggacaggggc

SEQ ID NO: 676 - DNA, 72 bp, Homo sapiens
ttcgagtccaatcaatgccctttctccttaatgaacgaggtgtccttggagtttgaggttttgttggatgat

SEQ ID NO: 677 - DNA, 72 bp, Homo sapiens
tgaactgcagaaaagagaggatcaggcatgtcaggcgctgcccacaggaactgggctcctggggattaagca

SEQ ID NO: 678 - DNA, 72 bp, Homo sapiens
ttcagccctggggctcaggaaatggctcgtgacaccgtctgtctacgcacctggcagtgccacctgggcaga

SEQ ID NO: 679 - DNA, 72 bp, Homo sapiens
gtgatgcaatcacagaatccaaattgagtgcaggtcgctttaagaaaggagtagctgtaatctgaagcctgc

SEQ ID NO: 680 - DNA, 72 bp, Homo sapiens
aaggaagcctgcctccctggcaggcaagcaggcggcgggcgcggaagcaccagctttcacgtctctggcaga

SEQ ID NO: 681 - DNA, 72 bp, Homo sapiens
ttaaggcctcaggcctgctgatggcactgcctggccggagagtgtgggtacctttggacaagctttgtcagg

SEQ ID NO: 682 - DNA, 72 bp, Homo sapiens
ggccctaggggctaggcgtggggggatcgccctaccgtaggggagtgggggggcctcattcccacccttcct

SEQ ID NO: 683 - DNA, 72 bp, Homo sapiens
gagctgccaggagacagagagaagacaggttggagcgtctcccctagcagggctgccttagtggcccccaag

SEQ ID NO: 684 - DNA, 72 bp, Homo sapiens
aagcaacataagggaaggagcagctctcgctgtcacggagagacactgtgactcattctggagcactggctt

SEQ ID NO: 685 - DNA, 72 bp, Homo sapiens
ggcctcacagccttctagatgtcccaaagaaacctcgagtcatcataacatctactgaatttcccaaccatc

SEQ ID NO: 686 - DNA, 72 bp, Homo sapiens
ggagtttgcaaatggagagaggctgacttgcctgccggactcctacccccgatcccctctgagggcagtgct

SEQ ID NO: 687 - DNA, 72 bp, Homo sapiens
atttgagccctgagggcctcccccagtgtttgcatcgtcttcagctcctgatttctgagcatgctcccctcc

SEQ ID NO: 688 - DNA, 72 bp, Homo sapiens
tctgagagcccggggagacttcagggccagaggctcgcccagccccagcacatggtagtatacctaagagag

SEQ ID NO: 689 - DNA, 72 bp, Homo sapiens
ggatcttggttggttaacacattactgaatggtgacgtgggtaggtctgtctgcctgcatcaaatcctgccc

SEQ ID NO: 690 - DNA, 72 bp, Homo sapiens
agctcctggcctggctggccctgctgccctgtctgcgctggtgccagcactatgctgggtcactggggaagt

SEQ ID NO: 691 - DNA, 72 bp, Homo sapiens
ctagaaagtcagtgcttctctgctgcactgtgaggcgggaagaagatgtatttccacctcgcggggcacctc

SEQ ID NO: 692 - DNA, 72 bp, Homo sapiens
ctgcatcctctctgcctcaccccagcctaggattccgtgacaggccctctgggaagaactccgcgaacaacc

SEQ ID NO: 693 - DNA, 72 bp, Homo sapiens
ggtgtaactgcccctggacgacagcctggatgtggcgaggggagacggtccacaccctgctctcaagcatgg

SEQ ID NO: 694 - DNA, 72 bp, Homo sapiens
gccagggctgctcgcggaaagggcaagcgtggccccgcagtgatccacgaggctctggttagcccacccgcc

SEQ ID NO: 695 - DNA, 72 bp, Homo sapiens
gggccttggaatggtgggaatcaaactgggcagttcgtggccatcaaggggcagaagtctggtgctgggaag

SEQ ID NO: 696 - DNA, 72 bp, Homo sapiens
tggcgggcggggctcctgcctcggtgtccagtgcgcgcacccagctgagccccgtagtggtgtcctgtgcca

SEQ ID NO: 697 - DNA, 72 bp, Homo sapiens
tcaagtaattaaaaaccactccatggatggggccacgccggcagagaaaccttcttacagggaatgacttta

SEQ ID NO: 698 - DNA, 72 bp, Homo sapiens
gccagcattcttctgctctcttggtgagaatgaaccgtccattaagcctgtttgagattcatagtcatcaca

SEQ ID NO: 699 - DNA, 72 bp, Homo sapiens
cctgccctaacccacagccacaccagtgcctgccccgggcttcttaccagaaccccctgctggaaacccggc

SEQ ID NO: 700 - DNA, 72 bp, Homo sapiens
atggcctaggggccagacgctcggtgcagtaccctcgcccggcccgccagcgcccccctccagccgcaggca

SEQ ID NO: 701 - DNA, 72 bp, Homo sapiens
atctatgaccaggtctcagccaaaatcgtgccagacgatttcctaaaagaaagccaaatgttttagcaactt

SEQ ID NO: 702 - DNA, 72 bp, Homo sapiens
cagcgtctgtctacacctgggtgagccgtactggtcgtagtggccccaccctacaaggatgcccttcctaca

SEQ ID NO: 703 - DNA, 72 bp, Homo sapiens
gtgtctctttgggtgcgtgctggatccctgggggacgtggcacatccccaggctttctaaacattgggtggg

SEQ ID NO: 704 - DNA, 72 bp, Homo sapiens
ctccagccctccgcccgccggcccgcccccctccccgggcccaatctgttttcaaagtgtgtctgtccttta

SEQ ID NO: 705 - DNA, 72 bp, Homo sapiens
gacaccagagggcgccacagcaccagctcattccccggaggctccatcaccaagggttccggcttcacagaa

SEQ ID NO: 706 - DNA, 72 bp, Homo sapiens
gagggtcaccagggccatgttgcgtctctcgatggcgatgtgcagtgctgtctggcctacagaggacgcgca

SEQ ID NO: 707 - DNA, 72 bp, Homo sapiens
ggcctgctgatagggacctagaggaagtcaaactgcgtctctttctgggcctttggccaccaggcttggtgg

SEQ ID NO: 708 - DNA, 72 bp, Homo sapiens
tgacactaccagggcttcagattactcaatttccacgcttcctctatcaggggagagagtcctaacaaagac

SEQ ID NO: 709 - DNA, 72 bp, Homo sapiens
catttatatctgcttagtctctgattatatgtcctcgacacagcttaaataatggcagacagagcatctcgt

SEQ ID NO: 710 - DNA, 72 bp, Homo sapiens
ctcccccgggccctgctgcctccagctcaccctgtcgcctgatgtctaaataaggtgcagaggcacactccc

SEQ ID NO: 711 - DNA, 72 bp, Homo sapiens
gggcaggtcgcacccttcccccagctgaagagcagcgctcagaagagcccttcccccaccgcagcggctcct

SEQ ID NO: 712 - DNA, 72 bp, Homo sapiens
gaaagtatagacattttattgtggagcaaaaccaacgacaccctcaagggaggagtgcaggcactcaaagat

SEQ ID NO: 713 - DNA, 72 bp, Homo sapiens
actgggagtcttggtttccttacccgtaatatgaacgcagaggctccgagctccaagcatggtcagacttag

SEQ ID NO: 714 - DNA, 72 bp, Homo sapiens
tctgctggggcagctgtgcccctgaatcatgggcacggagggccgcccgccacgccccgcgctcaactgctc

SEQ ID NO: 715 - DNA, 72 bp, Homo sapiens
cacccccatgaaattctgggccacaggaaatggagcgaatagcaggaagtgtgaaaggacatctgcttcagc

SEQ ID NO: 716 - DNA, 72 bp, Homo sapiens
aacctgaacttcaggttcggagacgaggaggtggccgtcccccgtcccgcccccaacccgatgagggcgttg

SEQ ID NO: 717 - DNA, 72 bp, Homo sapiens
ctgttacctggagcagcaccttcagagggctggggcgtggccagaatggccaggagccctgctagggccaga

SEQ ID NO: 718 - DNA, 72 bp, Homo sapiens
cttcctttttctgcaggacggggccaggcacagaacgagctccccaggcccagctggtgcctgcctggccga

SEQ ID NO: 719 - DNA, 72 bp, Homo sapiens
ctccacttccggggcctcgagggctgaggctgactcgatgattcctggaaggtgatgatgtcatggtgacat

SEQ ID NO: 720 - DNA, 72 bp, Homo sapiens
actttcctgagtatctcaaccagttttgttgatgccggggtttgttcaaagctgcagattactgggcctcac

SEQ ID NO: 721 - DNA, 72 bp, Homo sapiens
gcaacttttacttttcaggcaatgctctacacagccgacccagtcaatgcagactggcattacccacatttt

SEQ ID NO: 722 - DNA, 72 bp, Homo sapiens
gaagctgccaagcacccccggtgctttgggccccacgcacagcactgagtgctgtaaggaaatgcaaagcat

SEQ ID NO: 723 - DNA, 72 bp, Homo sapiens
acatgctggctgagttttacacatttgcatagttccgcagatgttaacaactctgcatgtatagaaaacaac

SEQ ID NO: 724 - DNA, 72 bp, Homo sapiens
gaggccgccgagcgctgtggcctgcatggctcctacgtgctgagggtggaggctgaaaggctgactctcctg

SEQ ID NO: 725 - DNA, 72 bp, Homo sapiens
ccctccacgttcacgccttaccctgttcctcccagcgcagaatcccatgtgacttgtccagggactcccaga

SEQ ID NO: 726 - DNA, 72 bp, Homo sapiens
accctaagcactgccattctcaccagtacctcctacgactctgagttctgtttcttctgatcatatctggcc

SEQ ID NO: 727 - DNA, 72 bp, Homo sapiens
ggaagcacccaatgaacaccagcaatcactaccaccgctgccactgcctttgggagacatgaccatgggtcc

SEQ ID NO: 728 - DNA, 72 bp, Homo sapiens
cttaaatttgtaacacaaatgactgcatgactggtcgttctgtcaaatgaggcagtgaaatctagatggagt

SEQ ID NO: 729 - DNA, 72 bp, Homo sapiens
attggtgaatgatacacgggctcacacagctctgacggcttcacctctttcacctctaaactacatctctga

SEQ ID NO: 730 - DNA, 72 bp, Homo sapiens
tgtgaggtcctcccattctatctcattgtgcctcacgccctgctgctggcctcctttctgcctctctggctt

SEQ ID NO: 731 - DNA, 72 bp, Homo sapiens
ccacccagggtcctttcatcatgactgacgtccctcgagatgcaattattctggtctgcttttgtcacagga

SEQ ID NO: 732 - DNA, 72 bp, Homo sapiens
ccttataaatggagtgcattctatcaaaaccaggacgccttcagagctggagtgcagccagaccaacggggc

SEQ ID NO: 733 - DNA, 72 bp, Homo sapiens
aaccacgcctaaacttagtgggttcaaacaacaatcgtttatcatttctcaggggtccatagggtggctggg

SEQ ID NO: 734 - DNA, 72 bp, Homo sapiens
tcattcgtcattgatatccctcttgccttgttctacgtgttcttcaccacctaggacttatctgatgaggac

SEQ ID NO: 735 - DNA, 72 bp, Homo sapiens
cttctgtttggtttctgggcattgcattgttcacacgcacagcttagacatcaggaaatggtttgaagagaa

SEQ ID NO: 736 - DNA, 72 bp, Homo sapiens
ctcactctggatttccctggccagagtcctctctgcggaggaacttgggaccagttctttagggagttttgg

SEQ ID NO: 737 - DNA, 72 bp, Homo sapiens
gaagatgctgagaccagggccagtctcagctgcaacgccctgcttggaagccactatgggatgattctgcaa

SEQ ID NO: 738 - DNA, 72 bp, Homo sapiens
ccttggaaaatagttgcacaacagatcagctcccccggtttcagggctgaggtgggggatggaatcattagt

SEQ ID NO: 739 - DNA, 72 bp, Homo sapiens
aggggagcctggccgaagagcagaggcccccacggcgccctgtgtgtggaaacctccggatggccgcagggg

SEQ ID NO: 740 - DNA, 72 bp, Homo sapiens
cagagccaaaaggagtagctgataggtttcctttacgaaatggaataaaggactggctgagggcaggggagg

SEQ ID NO: 741 - DNA, 72 bp, Homo sapiens
tttttttactgtattgtgcaatcagaagttaagatcgcaaaagaacaaagcaaattatgattaatgtacagt

SEQ ID NO: 742 - DNA, 72 bp, Homo sapiens
gtagtactcagagctctacggaaacccaggcacctcgacctcaagaggatcagcctggccagggtggcacaa

SEQ ID NO: 743 - DNA, 72 bp, Homo sapiens
acatccagaaccctgatggcaggagagtcagagaacgggcacaccaccaagtgtgatgaaacttgtggggga

SEQ ID NO: 744 - DNA, 72 bp, Homo sapiens
gggggtgggggcgtgtgggaggccgagcctgtcctcggatcagttgcgtactctgcccgccccctctgactc

SEQ ID NO: 745 - DNA, 72 bp, Homo sapiens
ttgaacatcttttaactgctagccttttacatccacgactcattcagctgttgcaatacctctgaggtgagt

SEQ ID NO: 746 - DNA, 72 bp, Homo sapiens
gaatgtttgccatccctaggaagcctaacacagggcgctgggaaatgcttgcaaaagcagatattctcaggt

SEQ ID NO: 747 - DNA, 72 bp, Homo sapiens
ggaatgctggcctcccacggcaggccagggcaggtcgccccgggcctcagctccaccccatgcagcaaactt

SEQ ID NO: 748 - DNA, 72 bp, Homo sapiens
atgggacagaggcctccagctgcaccaccactgctcgttaacagctgccatccacaccgaggaagcctcttc

SEQ ID NO: 749 - DNA, 72 bp, Homo sapiens
gacgtctgactaacagaaagtcacatcagcagagtcgccaaggagcaatccctgtcttccctccccatcttc

SEQ ID NO: 750 - DNA, 72 bp, Homo sapiens
ggccggtgctgacatctgacctactggatggcagccgcctgtaggaacatcaccatagactattggaatttt

SEQ ID NO: 751 - DNA, 72 bp, Homo sapiens
ccagccttcagacatgaatcaggacatgtctggaccggccagagctattacatatgtttggccccagaaccc

SEQ ID NO: 752 - DNA, 72 bp, Homo sapiens
agtaccgggtgtccctttgagatggtgtggtgtgccggctggagtcagctggcgactctgactgtggccaac

SEQ ID NO: 753 - DNA, 72 bp, Homo sapiens
acttggaatcagtcggcagtcatgctgggtctccacgtggtgtgtttcgtgggaacaactgggcctgggatg

SEQ ID NO: 754 - DNA, 72 bp, Homo sapiens
agggaaggcacagctgtcttctaggagacacggagcgcaaaatagggcaccacatctagaacctgacaggct

SEQ ID NO: 755 - DNA, 72 bp, Homo sapiens
aaacaaggaagtaggcagtccagtcctgacctgctcggagttgaagcagtcggcgttggaagagcctgaaca

SEQ ID NO: 756 - DNA, 72 bp, Homo sapiens
gaaatcctgtgggcacccgaatgggggggcctccccgctcgtggggccctcccctgccctcccgcccgcccg

SEQ ID NO: 757 - DNA, 72 bp, Homo sapiens
tggctgggggaaaggttccagaaacgtcatcacaacgatgcatttcatcagaactgagcacatgaatgggga

SEQ ID NO: 758 - DNA, 72 bp, Homo sapiens
aaacagaaggcacagctaacggccagtagctgagacgccacctctgccacaggtcagctatgtgacccacgt

SEQ ID NO: 759 - DNA, 72 bp, Homo sapiens
gcccttcctgcccctgctcctggtccccacttggccgccagcagagaaggcaaaaagcaggaactagaggcc

SEQ ID NO: 760 - DNA, 72 bp, Homo sapiens
tccagaagggcaacaattgggtcatccatggggaccgggaccctggacttggcatcaaggcaggggcaggaa

SEQ ID NO: 761 - DNA, 72 bp, Homo sapiens
tttcactgccccagcgtaacccagagtccaggccacgcccagcacggctggctcccgtccgggtctctgtgt

SEQ ID NO: 762 - DNA, 72 bp, Homo sapiens
ggagacaggtgtctttgggcctcccagaggcggggcgcctggagcctgtgatttgtcagggaaatctcagcc

SEQ ID NO: 763 - DNA, 72 bp, Homo sapiens
ataggggagctagaagccactttccagccacctgccgttgggttttttcatatctgtacataatgccgagtg

SEQ ID NO: 764 - DNA, 72 bp, Homo sapiens
atggttagattaatttgtgaggcagctctttaagacgttcagaggtaagaaatactggatttataaagcaaa

SEQ ID NO: 765 - DNA, 72 bp, Homo sapiens
aaatggaagctgccccgtgacagcatcttctctcccgttgagtaatccctgcatgaatagatggcagctgca

SEQ ID NO: 766 - DNA, 72 bp, Homo sapiens
gcctcagcccatggcccggaggtacgatgagctgccgcactacccaagcatcgcggatggccccgcagccct

SEQ ID NO: 767 - DNA, 72 bp, Homo sapiens
cagcgaaaccacgagggtgatgaggacgacagccacgtccgggcccagcaggcctgcattgaggccaagcac

SEQ ID NO: 768 - DNA, 72 bp, Homo sapiens
taatttgcttagcctctctgagcttcagtttcactcgggagctggccaagaacacttgtctcagagttgcta

SEQ ID NO: 769 - DNA, 72 bp, Homo sapiens
gaggaaaaatgaagtcctgagctggtcagcccaggcggaagagccacccgaatccaaccccacagtgaatag

SEQ ID NO: 770 - DNA, 72 bp, Homo sapiens
gaaatgagaatgaatcagcactgacgaagaatgagcggatgcaaaaagtaagagtcagcatttacaagaagc

SEQ ID NO: 771 - DNA, 72 bp, Homo sapiens
ggatccttcttcctgtccctggctgttgctgagcccgtccccatggtaactgatctgccttgaggaaggagc

SEQ ID NO: 772 - DNA, 72 bp, Homo sapiens
ttgtcaggcagttgactaatgctcttgatttgaatcggaggctgctgtgaaaagggatgcagcttctgctag

SEQ ID NO: 773 - DNA, 72 bp, Homo sapiens
tggctcataacttgcagcataaatctccacaagtccgtaccgatataaggaaatgactgagtaaataaataa

SEQ ID NO: 774 - DNA, 72 bp, Homo sapiens
gctgcacgcctccttttaccttgtaacatttcaaacgcccttcccttcccggcccccaacatgcacaatcca

SEQ ID NO: 775 - DNA, 72 bp, Homo sapiens
gggaaggacctagggaggttcccttccctctggaacggaaatggaactttctctgagcttaggatttgtaag

SEQ ID NO: 776 - DNA, 72 bp, Homo sapiens
acaggaaggtgacactagggcctctgtgtctgccccggggcactgtcagctgggtcaggatttatgccctga

SEQ ID NO: 777 - DNA, 72 bp, Homo sapiens
tgatgctaacggttcctgggtgacgccatcctccccgggtccttcccatcaggcatcctcagtcatgctgta

SEQ ID NO: 778 - DNA, 72 bp, Homo sapiens
cggttacccttcgcagccccgggggatcctgggctcgcgctagtggctgactgggaagctaagagtggctgg

SEQ ID NO: 779 - DNA, 72 bp, Homo sapiens
tggccttcacccagtttacggtggcacctcgggaccgcttctgagtctgcttgtcgctgaaggtcggcatga

SEQ ID NO: 780 - DNA, 72 bp, Homo sapiens
ttttgtgagccggggaaaggccttgctgctttctccgccaggactgatgtgtcttcccaagatgaaagtgcc

SEQ ID NO: 781 - DNA, 72 bp, Homo sapiens
acttaatctgtccaaaacagaactcctgattagcacgtacctcataactcctttccgctgagtgtcctccat

SEQ ID NO: 782 - DNA, 72 bp, Homo sapiens
tctgttagtaaagcctgagggctcccagaaagcgacgatggtgctgtgctggcagaccgaatgttttttaaa

SEQ ID NO: 783 - DNA, 72 bp, Homo sapiens
tgttgggaggcggtggcggggagggagaaaagggacggcttcatatctcatgaatatgcatctgtgtttaca

SEQ ID NO: 784 - DNA, 72 bp, Homo sapiens
actttattgcagacagcagtcaatccacaactcctcgcaaaggctggtgattgagcaataagctttttgaaa

SEQ ID NO: 785 - DNA, 72 bp, Homo sapiens
tacttttctcagtattatgaggtagattacatgtacgaatgactcaacatttctgaggctgcttaagagtgt

SEQ ID NO: 786 - DNA, 72 bp, Homo sapiens
acttggacgcaggggcccttgccagccctggcccgcgctggagcgggaggctgggatttttagttcacgtag

SEQ ID NO: 787 - DNA, 72 bp, Homo sapiens
ctaccaaatggaggcataaagtgaggcagagaagtcggacagcttgagaacacgcatggccacaatgaatga

SEQ ID NO: 788 - DNA, 72 bp, Homo sapiens
acaggcggcgtcctcccaacaggggcagcaggacccgctggctggggccctgggcacggctccacaccagcc

SEQ ID NO: 789 - DNA, 72 bp, Homo sapiens
cattgaggctctcattggcccgccgccccatgggccgaagaaaatgatcgcaccgcagaggtggatcgacgc

SEQ ID NO: 790 - DNA, 72 bp, Homo sapiens
gtcaagttgcttaatttttacaaggccacaaaaagcgcaattatgccctgcagtttaaaatggaaaacgtgt

SEQ ID NO: 791 - DNA, 72 bp, Homo sapiens
gatgaggaggaagatgtccccggccaggccaaggacgagctgtagagaggcctgcctccagggctggactga

SEQ ID NO: 792 - DNA, 72 bp, Homo sapiens
tgtatgtcaagcccctgtcaagccacctggtgctccgtgtcctgtggatggtagctgccctgaagcgggact

SEQ ID NO: 793 - DNA, 72 bp, Homo sapiens
ggccatatgaaacacacggtacattccggtcccagcgtaacaaactgtaccagcctttttgagagctgtgag

SEQ ID NO: 794 - DNA, 72 bp, Homo sapiens
gctgtggtggaaattttaaccaccagaactattttcggtcagattttgctcttaatttagtcaagataattt

SEQ ID NO: 795 - DNA, 72 bp, Homo sapiens
gcccaaccactgtgagtaactcgggaggcactcgacgggggaggtgtctggggagggacttgcactgcacag

SEQ ID NO: 796 - DNA, 72 bp, Homo sapiens
gctgtggccatgttgcccacctggccagggacccccgacttgggtgggtgacagccagcctccccgccccca

SEQ ID NO: 797 - DNA, 72 bp, Homo sapiens
tatgagagcatgaaaccgtgcgctcacgccgcacacgagttgggtaaatggagcgcctcattttccagatgt

SEQ ID NO: 798 - DNA, 72 bp, Homo sapiens
ttcagacgggtggcttttttgagtcagccacgcagcggctgcacttgcattttctaacccaaattgggaaag

SEQ ID NO: 799 - DNA, 72 bp, Homo sapiens
actaatccagtggctcaatctatgattatctgacacgatccaagaatccacagtgtaacaggctctatgact

SEQ ID NO: 800 - DNA, 72 bp, Homo sapiens
tgtagctatgagagcatgaaaccgtgcgctcacgccgcacacgagttgggtaaatggagcgcctcattttcc

SEQ ID NO: 801 - DNA, 72 bp, Homo sapiens
aatgatgagacatttgccatgaggacctgaggagccgcaggcctgttagtcacaggcgatgagtcaccctgc

SEQ ID NO: 802 - DNA, 72 bp, Homo sapiens
gtcgtaccatagactggtctcggtggcgctgaacacgtcctgcgaggcgtagccctcggccaccgacggcgg

SEQ ID NO: 803 - DNA, 72 bp, Homo sapiens
acttgcaacttgcttctttctggggaataaatttacgataatggttaacatctacttgagggtttactatgt

SEQ ID NO: 804 - DNA, 72 bp, Homo sapiens
ggagggaactggcagccagtgccccagcaaactctcgcacatggttctacactcaggcccccctgagctaag

SEQ ID NO: 805 - DNA, 72 bp, Homo sapiens
gatggagaaatatgtcatcgagtcttcaagccacacgccagagctggcccgctgcccatcacctaccatgtc

SEQ ID NO: 806 - DNA, 72 bp, Homo sapiens
cacagcctttgtggtccccagagaagtcttaggcccggcaccgcctcctcctcctcaaagttaatccctaaa

SEQ ID NO: 807 - DNA, 72 bp, Homo sapiens
gatgttgcccatgagcagtgaaggatgacttttgacgagccatgtcagatgtgacaggcaatctagttggct

SEQ ID NO: 808 - DNA, 72 bp, Homo sapiens
cagctgcacttctgggaaatgcagaggctgcctgccgctttctttcgcagttttgcggcccaaggcttgggc

SEQ ID NO: 809 - DNA, 72 bp, Homo sapiens
gcatgctcactgccgagggcggcaggaaggggaggcggcggccactcccggccaagccctggagtgaagaaa

SEQ ID NO: 810 - DNA, 72 bp, Homo sapiens
ccttactcaactcagctcagtattggaggaggcctcggtgttcttcacagactaaagaaccaagagcagatt

SEQ ID NO: 811 - DNA, 72 bp, Homo sapiens
gaaacctgggggcgggggtcgaggaagccgagccccgaggctcccagcgccgccccaggaggaatcttgcgg

SEQ ID NO: 812 - DNA, 72 bp, Homo sapiens
gaggttttagccactatttcaaaactaggtcaagacggctcttgggaaatgtgatgttacatcacaaaatgg

SEQ ID NO: 813 - DNA, 72 bp, Homo sapiens
cagaaaacgtaaccctaacatacggccatactatccggaacatgcccaacctcctctgatctcagaagctaa

SEQ ID NO: 814 - DNA, 72 bp, Homo sapiens
gtagtgaacttcagaattcttcttcctctccattacgttggaaagatgaacaaagtagaaatggaacttttc

SEQ ID NO: 815 - DNA, 72 bp, Homo sapiens
gaaaaagacagcaaagacgtgtttctcttccttctcgtcacagaacaaactccttactcgagggtggagtat

SEQ ID NO: 816 - DNA, 72 bp, Homo sapiens
tcaggcccagcccctcggcaggaggacggggaccgcggcctttgggcagggctgacttggcactgaccacaa

SEQ ID NO: 817 - DNA, 72 bp, Homo sapiens
aggcctcacttttcaaggagtagacgctgcttcctcggccgtgtctctacacgtgtgcaccccagaattggg

SEQ ID NO: 818 - DNA, 72 bp, Homo sapiens
tgctgggtcagctcttgcctgtggctctggcctcacgggactctcaacaatgctgtgcaggccccactcttg

SEQ ID NO: 819 - DNA, 72 bp, Homo sapiens
ctcaccgcagacctcactgcatacttgaaggctgacgtatctgggctcacatacttctggaaaagatgagtc

SEQ ID NO: 820 - DNA, 72 bp, Homo sapiens
gggcctccctcccttctgggactaaacgagggactcggagggttctttgcttcagagatcacagagctttga

SEQ ID NO: 821 - DNA, 72 bp, Homo sapiens
tgctttattccccttactgcgcatgtgtcaggggacggaattttgcattgcaggcatgtctgcaagggcaag

SEQ ID NO: 822 - DNA, 72 bp, Homo sapiens
ctgagggtagggcctccaaacagccttgcttgcttcgagaaccatttgcttcccgctcagacgtcttgagtg

SEQ ID NO: 823 - DNA, 72 bp, Homo sapiens
aaccaacgggaggggtgactgtccatcccctccgacgggagtactcaggcccagcacccattttctctgatg

SEQ ID NO: 824 - DNA, 72 bp, Homo sapiens
actggaaacatctgcagcccccctcttggcctcctcggagccgtgtttcttggggtttgtctttgaggttct

SEQ ID NO: 825 - DNA, 72 bp, Homo sapiens
acagtggctcaggggcctgtccatggtcatgtacccgtagaactcaccgccgccgccgccgtctcgggccgg

SEQ ID NO: 826 - DNA, 72 bp, Homo sapiens
agtctccgtctcatcactgtgactcatcctccccccgggactggcagaatgactcaggctttcaagtaggtg

SEQ ID NO: 827 - DNA, 72 bp, Homo sapiens
aacaaagtcagggttaggaacttgggctttcaagtcgacagggctgtgttgaaatcctggtctgtggggcag

SEQ ID NO: 828 - DNA, 72 bp, Homo sapiens
aggttgagcagggagctactcagaggacccaaagccgcctagctgaccaccttcttccctatgagttcccag

SEQ ID NO: 829 - DNA, 72 bp, Homo sapiens
caccatctgcagaagccctcaggggcccccagcagcgcccctcctatccccctgccccagggcgggctgccg

SEQ ID NO: 830 - DNA, 72 bp, Homo sapiens
aagttgccctcctctttggagaaaattgcagtatccgagagctctttttaacaagggactacttttaaatgt

SEQ ID NO: 831 - DNA, 72 bp, Homo sapiens
gccctgggatcactcgctctgtggagtccgttgtccgttctctgaggactcaggaactgaggcctcctgctc

SEQ ID NO: 832 - DNA, 72 bp, Homo sapiens
gcaggcccactggttatccgaccttgtgctctggccgtgggtggagaccttacatccagctcagagcgcctc

SEQ ID NO: 833 - DNA, 72 bp, Homo sapiens
tggcaggcccgtgcccccttcctcctcgccgaggccgaggtcacaaccatctccgatcatctgcgtgggtga

SEQ ID NO: 834 - DNA, 72 bp, Homo sapiens
actgaccctgactgcagaacccacccatgatgcaacggctttctgtgattccgggaaccccaggactccacc

SEQ ID NO: 835 - DNA, 72 bp, Homo sapiens
tgaataggagaggttcaagtccagatgactgttcacgatgctggtcccccttgcatccctaatcatgctaga

SEQ ID NO: 836 - DNA, 72 bp, Homo sapiens
tatcatcttcatctgtaacagggcgatgcctctgccgtgtctggtggtgttgaggagttcctgtttgtgtaa

SEQ ID NO: 837 - DNA, 72 bp, Homo sapiens
acagcgcccggcacatagtaggctcttaattcattcggcattaagcaaatattcattgagagcctactatgt

SEQ ID NO: 838 - DNA, 72 bp, Homo sapiens
cttttaatttagggccctttctttgttgtaccatacgtgtgttgtatctgacattatactgaggcttatgga

SEQ ID NO: 839 - DNA, 72 bp, Homo sapiens
gcgggagcctgaagtggcagggctgcttaagcacccgggcctgcctgactccatgctgtggggctggaggcg

SEQ ID NO: 840 - DNA, 72 bp, Homo sapiens
ccagatgcacagaggcggcttgtgtcagcagagaccggtgagtacatggaagagtccttcttttcgtgaccc

SEQ ID NO: 841 - DNA, 72 bp, Homo sapiens
ggagcggtcagttctagatgatcaagaaggacctgcgtggtttgctgcagccgaagctgcttctctctcttt

SEQ ID NO: 842 - DNA, 72 bp, Homo sapiens
acgatgagtgataaggaggaggcagatctgagtgacgaggcatatgctggaccctggccagttgacaggcct

SEQ ID NO: 843 - DNA, 72 bp, Homo sapiens
ttgaaatagctgtggttacaaataagcaccagggtcgtaggagccctaagaattcattgagggttcagagcc

SEQ ID NO: 844 - DNA, 72 bp, Homo sapiens
ggtcaccctgctttcctcctctgtcctcagttttacgttctcagccttttctttccaagatgatgacagtat

SEQ ID NO: 845 - DNA, 72 bp, Homo sapiens
ggagctccagtactgtagtttactacagcacgagacgccacaagtaaagcagacaaagacacaccagaggga

SEQ ID NO: 846 - DNA, 72 bp, Homo sapiens
gttccagtgaaactttatttacaaaaacaggaatccggcccacgggccacagtttgcaatccctggtcattg

SEQ ID NO: 847 - DNA, 72 bp, Homo sapiens
tctcccctggaaaaggcctctcggcgggtcctggccgtggtgctagaagatgtcatggctgttcacatggtg

SEQ ID NO: 848 - DNA, 72 bp, Homo sapiens
attccaaagacactttgaataccttttggtactcacgcttcactcagatcccccaccagattgagctccttg

SEQ ID NO: 849 - DNA, 72 bp, Homo sapiens
gtgccaagtccttgcgtaattatgcatttgaggtacgttttctctcttgcagggaacagcgtgtgggtgtgt

SEQ ID NO: 850 - DNA, 72 bp, Homo sapiens
cgatgaggcatacgctgaggagtttggcaacgagacgtggggcgtaacaaaggtgaggcctggtcctggtcc

SEQ ID NO: 851 - DNA, 72 bp, Homo sapiens
ctagaatggtggcggtgaaaatcgccactgggaaacgaaaagattctaatgttggttgggctgccggcctgt

SEQ ID NO: 852 - DNA, 72 bp, Homo sapiens
aaccctatgaataagctgttacacttccattttaccgatgagacgctgcaaagttgagtaacacagtcgcag

SEQ ID NO: 853 - DNA, 72 bp, Homo sapiens
aggttcttcttttaagtaatataatctaaaacacacgtactctctcccccaccccaaatctgccagtatgac

SEQ ID NO: 854 - DNA, 72 bp, Homo sapiens
ctaggcacttgtaaggccgctcgcccgtgtgtgtgcgctggtgcttggtcaagtgggacgtcttgctgaagc

SEQ ID NO: 855 - DNA, 72 bp, Homo sapiens
ctgtcactcaagctggagtgcagtggtgccatcatcgctcaagggatcctttgatctcagctggcactacag

SEQ ID NO: 856 - DNA, 72 bp, Homo sapiens
agacagagatgagaggaagtggtagcagatgaaatcgaagagttgggtgttaaatcttgcaatactttgtag

SEQ ID NO: 857 - DNA, 72 bp, Homo sapiens
agggagccggggctggtggcggcgggcggcgagtgcgccacgggcatggacatggagcggctgtgttgcagc

SEQ ID NO: 858 - DNA, 72 bp, Homo sapiens
acttctcccttttcttgctgtgcaaccttgggcaacgtgcttactctcaatgtgagtgactcagtttcctca

SEQ ID NO: 859 - DNA, 72 bp, Homo sapiens
agcattaggaggtcatgccatacaactcacgtatgcgggcaaacacttttgatttgcatatcctgggtgtac

SEQ ID NO: 860 - DNA, 72 bp, Homo sapiens
aacaccacagtgtggtttggacgtggccacagtgccgtacaaaccacagtgtgctgctggggcgggagcagg

SEQ ID NO: 861 - DNA, 72 bp, Homo sapiens
agtgaaatgaaatcaggctgctatgtgtcaggctgcgatgtggggccctgtgtcctgagtcacacaccaaaa

SEQ ID NO: 862 - DNA, 72 bp, Homo sapiens
gttgcctttgaagatggaggaaggggagcataggacgaggaatgagaacaatctctagaagttggaaaagac

SEQ ID NO: 863 - DNA, 72 bp, Homo sapiens
gggagatgacatatattcagaatgtaagcaccagacggggcaggggagacgaggatgaaaggagcagagcaa

SEQ ID NO: 864 - DNA, 72 bp, Homo sapiens
actcaaccataaagacgggtttaacttttctagagcggtgacattggagaaatagcttcagtttgtggagac

SEQ ID NO: 865 - DNA, 72 bp, Homo sapiens
cgccaggtggtgtacatgcaggccttggcacgcctcgcccagtgcccgccccaggcccatgaggccccgctt

SEQ ID NO: 866 - DNA, 72 bp, Homo sapiens
tccaaaacacctccttggccactacctaatttggtcggggtcccctgcagttttagggagtgactaaataca

SEQ ID NO: 867 - DNA, 72 bp, Homo sapiens
tcaacagcattttcctctgaaagacattttgtagacgtttcccatgattatctcctattccggatggcccat

SEQ ID NO: 868 - DNA, 72 bp, Homo sapiens
actgttgagcttcccaggctcagaacctaagaacccgcaactggaaggaaaaggcagcagaagatgagaaaa

SEQ ID NO: 869 - DNA, 72 bp, Homo sapiens
tgtgtgaccaacagcacatggcagaagtgatagtacgtcacttctaagattgggtgataaaagacttgcgtg

SEQ ID NO: 870 - DNA, 72 bp, Homo sapiens
gcacggctccccagtgcgagcacgactcggctgtccgtaattcctgccttgtgaggctctgtcaggcgcagc

SEQ ID NO: 871 - DNA, 72 bp, Homo sapiens
agaagcttatcttgctctcttggctctctcactttcgctgcttttccctgtgcctaaggtctcctgctgcct

SEQ ID NO: 872 - DNA, 72 bp, Homo sapiens
gctgagactgtaagtgtgaaccaccactcccagtccgagacctggcttttgacttattatacctgtgctcct

SEQ ID NO: 873 - DNA, 72 bp, Homo sapiens
gccagcaggattccatgtgatttcttcctttctaccgggctttggggaacatcagaagaggtcactgaggaa

SEQ ID NO: 874 - DNA, 72 bp, Homo sapiens
ctcacccatgtccttttcagacatgggcctccctccgtgtggcctctgctgtggtggacctgcctggtcaca

SEQ ID NO: 875 - DNA, 72 bp, Homo sapiens
agaaatctcagctgaaactcacttaacaataaggacgtggattatgttgcacaacaggaagtacaagaaggc

SEQ ID NO: 876 - DNA, 72 bp, Homo sapiens
ggctcttatctgaaataatcaataaatatcaaggacgtgaagatgtcatgcaaggagcaaagggggaaagta

SEQ ID NO: 877 - DNA, 72 bp, Homo sapiens
tcccagctcaaccaaatcggagttgtgggcagtcacgggcttccacaagcctcgagttgccccatctattca

SEQ ID NO: 878 - DNA, 72 bp, Homo sapiens
tcctgggcgcagtgactaatacctcctgctctaggcggcccccaccccctttccctcaagggtcagctggga

SEQ ID NO: 879 - DNA, 72 bp, Homo sapiens
agaaggggaaatgtgcaatgaaagacacagatattcggggccttacagtcagagaccaaatgagggatggtc

SEQ ID NO: 880 - DNA, 72 bp, Homo sapiens
ctgggcacagctcgccctgagccttcgttagccgacgccctgcagtgggtcctaggcacaccctgggtggtc

SEQ ID NO: 881 - DNA, 72 bp, Homo sapiens
cagagggtcacacctgccccgagccagcctgtccccgtggtctagccggcctgtccccgcggtctcggcatc

SEQ ID NO: 882 - DNA, 72 bp, Homo sapiens
acagctgacggcagaatgaaggtctgacccccgcacgggccaggctttcctctcgccccacccgatcctctc

SEQ ID NO: 883 - DNA, 72 bp, Homo sapiens
ggggatgatgaggcaatccaaagatgagcaacagccggaagtcactactactcttaagactggagagataaa

SEQ ID NO: 884 - DNA, 72 bp, Homo sapiens
agtagagatgtccctggggagtggccgcaaagtcacggagttctggaaggtcagagttgacaggatcctttg

SEQ ID NO: 885 - DNA, 72 bp, Homo sapiens
agtcgagtcagcccgctggggttcctgattctctgcggttctgggaagagcttgcagtggaaggcctcccag

SEQ ID NO: 886 - DNA, 72 bp, Homo sapiens
aggggagaggctcggtgacaggggcaggaaagggacgacttgggagctactggacagagctggcactggact

SEQ ID NO: 887 - DNA, 72 bp, Homo sapiens
ttaaaggggtatcctgctccatgaggctggcagttcggtaaacttcttataaggcactggagcatgactcct

SEQ ID NO: 888 - DNA, 72 bp, Homo sapiens
ctttaaattcaggaagcggccttagagtgaggttccgatcacagagttcagttcacctctcatttttttctt

SEQ ID NO: 889 - DNA, 72 bp, Homo sapiens
ccccctcctgcggagccgcaaagctcacgagtgtgcggaaagtgacccggaccctgcagctgcctctcggcc

SEQ ID NO: 890 - DNA, 72 bp, Homo sapiens
tcccacgagatcctttccttggtgcctctgatttacgaaagggagatctttttcttaatcccaatgcaccct

SEQ ID NO: 891 - DNA, 72 bp, Homo sapiens
gtctggggagccctcggagaggaaattggaggtctcggttcagacttggactctggctcagcttctggttct

SEQ ID NO: 892 - DNA, 72 bp, Homo sapiens
ggtgggacagagtggctgacggcgtgtggcacaggcggggtgagcccggaagggtgagcatgcgcctgctga

SEQ ID NO: 893 - DNA, 72 bp, Homo sapiens
agagaaatgggaaaatctgggggggtgttgggacccgcagtcttttgagaagaggtcaccacaggaagagac

SEQ ID NO: 894 - DNA, 72 bp, Homo sapiens
ggatagtgactcagattgggagggaacatgccccccgggacagatttctatgttgctggttatgatgaaata

SEQ ID NO: 895 - DNA, 72 bp, Homo sapiens
ctttgctgaatcaactgcagtcaggcgagggttcccgtggttgctctgtggttgctctgagtcactgtctgg

SEQ ID NO: 896 - DNA, 72 bp, Homo sapiens
ctccttgcgggccagcagcccagccggttcatgctcgctgcacgcctccttttaccttgtaacatttcaaac

SEQ ID NO: 897 - DNA, 72 bp, Homo sapiens
ttttttctacagctgttgatgccccacaggactcacgatcctgctcccatctttggagagattggagagcag

SEQ ID NO: 898 - DNA, 72 bp, Homo sapiens
tctgacccccttgcctctggaaaggcagagtcctccgagtcccccatggcttccgctctcctggccaggaca

SEQ ID NO: 899 - DNA, 72 bp, Homo sapiens
tccggagtgggggctctgtcctctcctctgacgaccgctgcgtggctcttgcataacctcccctttccccca

SEQ ID NO: 900 - DNA, 72 bp, Homo sapiens
tggcagagcccaagccctctccatgagatctgcagcgtttgtccacacggcagggcaaattaccttgtagag

SEQ ID NO: 901 - DNA, 72 bp, Homo sapiens
tgcaggccgcacagcctcaaccaggctgcacccgccggcctctgggcaagtttcacatgtttagttgtgaaa

SEQ ID NO: 902 - DNA, 72 bp, Homo sapiens
gctaataaaagcacttccacagggctcctgactctcgtgtgttacataactcctccatccttccagagtaac

SEQ ID NO: 903 - DNA, 72 bp, Homo sapiens
caaacccttatataatagacgagtagaccaaggcccggaagggtgatgtggcttgttcaaacccctccgcca

SEQ ID NO: 904 - DNA, 72 bp, Homo sapiens
aatagtcatctgtaattagaaagaggccccttgtccgcctcagtctggagtgaaggtttaagaaataaacat

SEQ ID NO: 905 - DNA, 72 bp, Homo sapiens
ccttccagtgagtcagctgattctgcagagggaaacgcggttccaaccccacgtcatacataacttttgagt

SEQ ID NO: 906 - DNA, 72 bp, Homo sapiens
tagaaggcagtcttgtgggtgcctcctcccccagccgcaactcaggtctgcagctgggtcctgcctccttcc

SEQ ID NO: 907 - DNA, 72 bp, Homo sapiens
agagtccatttctcctgcgcagaccagccctcttgcgcattcaacaaaaccacgggcttgtaaggtctttca

SEQ ID NO: 908 - DNA, 72 bp, Homo sapiens
ggggctgcatctctgtatattggcgtttcaagcctcgatgtggtgtgtggcaggattcatttataagaaagc

SEQ ID NO: 909 - DNA, 72 bp, Homo sapiens
tggctagcactgcctgagactactccagcctcccccgtccctgatgtcacaattcagaggctgctgcctgct

SEQ ID NO: 910 - DNA, 72 bp, Homo sapiens
cctgctgccgtcctgtttctgagtctctgcagtctcgggagctccaggatccaaattcgttctgtgccctga

SEQ ID NO: 911 - DNA, 72 bp, Homo sapiens
tcccctcatctcccccactcttcctgatcctgcagcgtcagatcccagcctgcagtatcagacctcaaaagg

SEQ ID NO: 912 - DNA, 72 bp, Homo sapiens
caaaggaagatactgacatgttcagattaagaaatcgtaaagcttctgaactactaaggaagggaaaagagg

SEQ ID NO: 913 - DNA, 72 bp, Homo sapiens
tgtctcctaagaaatgatgattcagtttcctcaaacgtttctcacagtcactactggttgcttggaatggct

SEQ ID NO: 914 - DNA, 72 bp, Homo sapiens
tactcgccgattccttccacttccccaccctatcccggaaaatccctaaaataagcagttgcactggcttag

SEQ ID NO: 915 - DNA, 72 bp, Homo sapiens
tcttcagggagttcttaactgtgggactctgagtgcgttgaattgttgtctgcaggtccagggggtcttggg

SEQ ID NO: 916 - DNA, 72 bp, Homo sapiens
cccctctgtgatctcatttcatctgcactgccatacgtggagtgagcaagacagggcttaccatcctgtcta

SEQ ID NO: 917 - DNA, 72 bp, Homo sapiens
ccattcatcatcttggattaagtcacttcatgtttcgtaattctcttttgtcatctaagacataacaatatg

SEQ ID NO: 918 - DNA, 72 bp, Homo sapiens
tgggaacaggaaatctgcaataatgttctccctaccgtcaagtaggaaaacagcaatacggtgaacaatagg

SEQ ID NO: 919 - DNA, 72 bp, Homo sapiens
tcctccaaatcttttgcaatacacatttggtaatacgtgggtcatttagttctggcttccaggcagttcagc

SEQ ID NO: 920 - DNA, 72 bp, Homo sapiens
acaagacaggaagcatgagtcaggaataagtggtgcgcagtgtgagtcatgcctgtaagatcaataaagaag

SEQ ID NO: 921 - DNA, 72 bp, Homo sapiens
taaggtattggggtttcacataatttttcctttgacgggggagtgttttgctgctcaacagaaaaggtctga

SEQ ID NO: 922 - DNA, 72 bp, Homo sapiens
tgggttgggcccctccctcctccacccaccaccctcgcagagttgcttcttgccacatactccaacttcaca

SEQ ID NO: 923 - DNA, 72 bp, Homo sapiens
gggctgtggctgaccacagactctgtgcccatcaccgtctcccaaactatggaggggaacttcctcccctcc

SEQ ID NO: 924 - DNA, 72 bp, Homo sapiens
actacgactctggacagatctgccatccctgaattcgtcaccatggccgtgtcttgctcattttcccagccc

SEQ ID NO: 925 - DNA, 72 bp, Homo sapiens
ctcttttttgtaacagaaactgtactgcttttattcgattgcaaaagcaacccacagcatcgtagaaaatgt

SEQ ID NO: 926 - DNA, 72 bp, Homo sapiens
agcacaaatgcctgccagcgtggaggatggggctccggcagatgacccccgaggggtgagcacaggacctca

SEQ ID NO: 927 - DNA, 72 bp, Homo sapiens
gctggtttcttataagtagcatgactaactgattgcgccacaggagctgaggtttcaggccagtttctgtcg

SEQ ID NO: 928 - DNA, 72 bp, Homo sapiens
tggctgctgtagtaattgaatgcttagctacgtgccgggccctttgccagctacagctcatgtgagacctca

SEQ ID NO: 929 - DNA, 72 bp, Homo sapiens
taccccctcaatatcacaaaacccccaagtcccagcggagccggagcaggaagtggagaaaggcctggggcc

SEQ ID NO: 930 - DNA, 72 bp, Homo sapiens
atgagagaggcactcaagtctcaaaacgcaattggcgttggccctcggggtccaggaattttgacgcagtgc

SEQ ID NO: 931 - DNA, 72 bp, Homo sapiens
acacgatctctggggtcccctgctcatgtggctttcgctcatgtggaagcacacaatagacaggcactgaag

SEQ ID NO: 932 - DNA, 72 bp, Homo sapiens
gtcttttgacataagtcctgccctggaggaatttacgaccaagagtaggaaccagatacagccagaggaaac

SEQ ID NO: 933 - DNA, 72 bp, Homo sapiens
ctggcttgtcttccctgcctctcttcttctcctaacgctttgtctgtctctgctttcctggccccgggcctc

SEQ ID NO: 934 - DNA, 72 bp, Homo sapiens
gctttggcgatccagcgggcaagcgaaggacaccgcgggaaggggtggtacccggaaacgcagctgggcagt

SEQ ID NO: 935 - DNA, 72 bp, Homo sapiens
gggtcatgacgccttcccttactcatgcattctcacggcacttgctgatttatttgaagactcccctattca

SEQ ID NO: 936 - DNA, 72 bp, Homo sapiens
ccccaccagccggaggctcgcagccctcctgggtgcgccttgagagaaggcgctcctcgaccaccccagctg

SEQ ID NO: 937 - DNA, 72 bp, Homo sapiens
gccctccaggcccctgcctgccccagcatcccctgcgcgaagctgggtgccccggagagtctgaccaccatg

SEQ ID NO: 938 - DNA, 72 bp, Homo sapiens
gcagatgcactgaagtaggctcatctggcggccctcggaggaaggaccgagtgttgcataattccagcaaat

SEQ ID NO: 939 - DNA, 72 bp, Homo sapiens
tttacgcaatgactgtccttctccagagaaagcgacgaatctgcctccagcttcatcctaggtttgaagaga

SEQ ID NO: 940 - DNA, 72 bp, Homo sapiens
ggagaggagaggggccccaagttgtgtagggctgccggggttcgcccgcttcctttataggccaccaagtgg

SEQ ID NO: 941 - DNA, 72 bp, Homo sapiens
cccagatacaagccaaccatttcacctgtggtgagcggaaggcgcagctatctataacacctgagaaaaaaa

SEQ ID NO: 942 - DNA, 72 bp, Homo sapiens
ctagaatctggagccaagaggcgcactttgagttgcgctcctggccccccttgcagagacgccagggttggc

SEQ ID NO: 943 - DNA, 72 bp, Homo sapiens
cagggctgggcccagtcctctaactggtctggtgccgcctcctcctcgcccacaccccgggctgtagactga

SEQ ID NO: 944 - DNA, 72 bp, Homo sapiens
atgcctgtcattagtggtgtgtttgagacgccccacggtgttcttacaacataaaacctgggtgacttgcag

SEQ ID NO: 945 - DNA, 72 bp, Homo sapiens
tgatggagactttggggagaaaagggaagccagcacgggcagagttgttttgaattttcttcaacccagact

SEQ ID NO: 946 - DNA, 72 bp, Homo sapiens
cccatagctacttgccacaactgccaagcaagtttcgctgagtttgacacatggatccctgtggatcaactg

SEQ ID NO: 947 - DNA, 72 bp, Homo sapiens
tgatcttccagcaatcctatcataggttatgagagcgtataaagaggaagagaggaggagagaatccaagat

SEQ ID NO: 948 - DNA, 72 bp, Homo sapiens
ggctgttactgacagatggacttgggtcagaatcccgatttcacccttcctttgctgtattaccttgcttga

SEQ ID NO: 949 - DNA, 72 bp, Homo sapiens
cacccccgccccggagacggcctctgaggccagggcgtagctgcagcctgggatgggagcggtacaggcttt

SEQ ID NO: 950 - DNA, 72 bp, Homo sapiens
caggatgtctttgggaaggccctgattgagattagcgaaagggattctggccaaatccctgatcaagttgct

SEQ ID NO: 951 - DNA, 72 bp, Homo sapiens
cactctgctgcttacggtcacagagctcgagcaggcgctgtcacttgggccatgtgagccagtgactcattt

SEQ ID NO: 952 - DNA, 72 bp, Homo sapiens
cccaggcctgctggccacagcagctgggccacagccgtggccccccacacccagagcccaccgggcccctgc

SEQ ID NO: 953 - DNA, 72 bp, Homo sapiens
aggcccgtctgggcagcagctcccaggccctggcccggggctcagcgctgcctcgtggctgagaagctcctc

SEQ ID NO: 954 - DNA, 72 bp, Homo sapiens
cggctggcccctacttgtgccaaaaagtctctcggcgggtgccaggcagggctcaggaagtgctcggctgcc

SEQ ID NO: 955 - DNA, 72 bp, Homo sapiens
gcaggagcagcctcttcctccctttggggaggccacgctgcgcgcccacctttcccaagagtagagggcggg

SEQ ID NO: 956 - DNA, 72 bp, Homo sapiens
atctctgaaattttttaagcaacaacttcctgaagcgtggaatttatggggccagtgagacactaaaatttc

SEQ ID NO: 957 - DNA, 72 bp, Homo sapiens
agggcatgcctcctcctccaggaagtccatcaaaccgctccctccctcctctaagcccacacaacctgtttg

SEQ ID NO: 958 - DNA, 72 bp, Homo sapiens
ttaatgtgctgaaataatcactgcctgcttcaaaacgtagctcaaaaaaaatccacatttttcttcagatcc

SEQ ID NO: 959 - DNA, 72 bp, Homo sapiens
gttgaaagcaaccgtgagacccaagttctagtctccgtcctgctacgaacgtgctgtgtgatctcaggcaag

SEQ ID NO: 960 - DNA, 72 bp, Homo sapiens
tcccagcccacagtgggtcccccagtcgctcctgacgaacaaatctaggcagcacctttcagtcccgaggga

SEQ ID NO: 961 - DNA, 72 bp, Homo sapiens
gtctgaggcagaagggacaaagtgtgcacaggccacgtgagtgagcaagtctgctgatttccaggaaaggaa

SEQ ID NO: 962 - DNA, 72 bp, Homo sapiens
ccacggcgccctgtgtgtggaaacctccggatggccgcaggggggtggggggagaaccaaagccctgggatc

SEQ ID NO: 963 - DNA, 72 bp, Homo sapiens
ctcccactttgctgcgtttttctgaatggtgaaatcgtggtcagccactgcttctaaaggcagctgctctgg

SEQ ID NO: 964 - DNA, 72 bp, Homo sapiens
ggctgtctgagtaccaagcctttgaaatcatatcacgaaaatctatccctgagcctatatctcaaacatagc

SEQ ID NO: 965 - DNA, 72 bp, Homo sapiens
tgagcatgtgaaatcatcctctttcttgcatcatgcgtgtccacattgcacccccccacccccataccccta

SEQ ID NO: 966 - DNA, 72 bp, Homo sapiens
ggctgggcaccaggctcacaggaagccaggcagtgcgaaaccctgaggggctcagagtgctcggtaggatgg

SEQ ID NO: 967 - DNA, 72 bp, Homo sapiens
ctcaggtgtcttgggcacttcccctccccagagaccgttctccaagcacaatccttgcacatgactttagtt

SEQ ID NO: 968 - DNA, 72 bp, Homo sapiens
tcttaataatgtcttacaaccccctgttgtccctccgcactcttgtccatggtcctacaagacccaaaccag

SEQ ID NO: 969 - DNA, 72 bp, Homo sapiens
cactgctggggagccgctggctgccaggaagctcccgttcaccaggatggaggaggaagccgggcaaggcgc

SEQ ID NO: 970 - DNA, 72 bp, Homo sapiens
cccaacgtcactagctggggtgtgtatggctcacacgtaggccaggctgccctaggcttggtgtgcaaggga

SEQ ID NO: 971 - DNA, 72 bp, Homo sapiens
cttcagcattgccacagacatggcctgggagctcacgggggtgtagggaccccagaaacaatttgagaggac

SEQ ID NO: 972 - DNA, 72 bp, Homo sapiens
aagtcccgggagcatgggttcacctggccccctgccgtcctgcagataccctcatgatgtggtgaaccacct

SEQ ID NO: 973 - DNA, 72 bp, Homo sapiens
gggtacctgtgattccagccgcagtggcctgtggccgtccgtggactggaggcctcacccgcggcaggcctt

SEQ ID NO: 974 - DNA, 72 bp, Homo sapiens
gtggcaagtgatactaagtcacctctgaggttaggcgacaaaggctgtgtacaccctgccttcctctctcta

SEQ ID NO: 975 - DNA, 72 bp, Homo sapiens
ctgcaactaatcagcagcaaagctaccgaataaatcggttccacaccctggggccgggcagcccagcacgtg

SEQ ID NO: 976 - DNA, 72 bp, Homo sapiens
tgggcatcacgggccccgagggacatgtgctgagccgacctgaggaggtgaatgttcaccaagcggaatgcg

SEQ ID NO: 977 - DNA, 72 bp, Homo sapiens
tcccagttctccagctcgtagagggcccaagtggccgctataatctgaaagagcagatatcgtaatcccata

SEQ ID NO: 978 - DNA, 72 bp, Homo sapiens
gatacacaggcagatgtggagacagcggactcccccgacacgaaggcgctgtgaggaccctggctttgggca

SEQ ID NO: 979 - DNA, 72 bp, Homo sapiens
tggggagccagggcaccagggcacagggctggcagcgtggagtcgaggctgctccagcccaggctgcccgcg

SEQ ID NO: 980 - DNA, 72 bp, Homo sapiens
tccctgctatgttcctccaagtgtgcccagagatgcgtgtgtgtgtgtgtgtgtatacacaaatgtctgctt

SEQ ID NO: 981 - DNA, 72 bp, Homo sapiens
cacaccaacagcggatgctgcatctgggtagttcacgtacccgaacaaaaattttaaaaatttggtgtggcc

SEQ ID NO: 982 - DNA, 72 bp, Homo sapiens
caggacgcttcctgccacccctgcagagcatgggacgcttcctgccatggtgccgtggcaatgggtggcacc

SEQ ID NO: 983 - DNA, 72 bp, Homo sapiens
aggatttcaacatgtgaattttgaaaggacacaaacgttcagaccatagcaggggaggacacaggtgcaaca

SEQ ID NO: 984 - DNA, 72 bp, Homo sapiens
accagctgctcactctgacccacgatacagcagcccgcctggtccagcagcacttgcatctggtcagacatc

SEQ ID NO: 985 - DNA, 72 bp, Homo sapiens
tgctttgcccaaggacagggtctaattgataatggcgtgtgggggagatgtggctcctgaggcctggagcat

SEQ ID NO: 986 - DNA, 72 bp, Homo sapiens
cacaggaaatacaaccgcagtgacctggacttctgcgttagtcatgatcagtacgtattaggtcacagctag

SEQ ID NO: 987 - DNA, 72 bp, Homo sapiens
ttgctgaagcctttgccacattcggggcaggtgtacggcttgtcagccccatgggaagcccgtcttcctggt

SEQ ID NO: 988 - DNA, 72 bp, Homo sapiens
aagcaaaacagtgagaatgaacctcacagcagtcacgttaaatataaatgctgttaacattaaagcctcaga

SEQ ID NO: 989 - DNA, 72 bp, Homo sapiens
cacgtcattactcggcagagggtgtccagcctggtcggccgacgtcacagtggatggccctgcgtggctggg

SEQ ID NO: 990 - DNA, 72 bp, Homo sapiens
ccctcagtggattcggggaaatgatttgacttacacgccacttctttgacaagaatcccatatctctgcttc

SEQ ID NO: 991 - DNA, 72 bp, Homo sapiens
ccttccctgaggccaagagagccccccagtctgtgcggaatggaatggaagagctcccttgtatacgttatt

SEQ ID NO: 992 - DNA, 72 bp, Homo sapiens
ggcatggagtgggactggcactcctttctcctcggcgttagagcccaggctgcaccatctgccctgggggca

SEQ ID NO: 993 - DNA, 72 bp, Homo sapiens
tggctggagagttggacacccccacccccactcggcggtgctctcagtgaggcagccccgggtgagagctgc

SEQ ID NO: 994 - DNA, 72 bp, Homo sapiens
tctaaaagattctttttccatctccctgcatgtctcgctctccctttaaccgactcactcttcagctgccac

SEQ ID NO: 995 - DNA, 72 bp, Homo sapiens
aacacagtctcagctgtgattctcccttttcccttcgtcctttttctgccaagttctgcaaaatagcatgta

SEQ ID NO: 996 - DNA, 72 bp, Homo sapiens
aatcatggagaaaaagttcccatggtgtgtattggcgagagaagaggattgtttccttttggctttgcactt

SEQ ID NO: 997 - DNA, 72 bp, Homo sapiens
tccggtaatgtaggagaagaatctgagcagggaaccgtctgtttcctggagccccatgttaggaccccagta

SEQ ID NO: 998 - DNA, 72 bp, Homo sapiens
aaaaatatgtaaataatttttgtcccagtgagaaccgagggttagaaaacctcgatgcctctgagcctcggg

SEQ ID NO: 999 - DNA, 72 bp, Homo sapiens
catgggtgaaaagaccgggctccacagacggctcacggagcaggtgcctccatatgtggctggagcccccag

SEQ ID NO: 1000 - DNA, 72 bp, Homo sapiens
cgcgggactgtgctgcctgcctagccagtgtgggccggctctactactggccactgccacgcccctgggacc

SEQ ID NO: 1001 - DNA, 72 bp, Homo sapiens
atgggctgccaggagcgcaggccacatcacggggacggtttcattgggaggaacattttatgtttactgggt

SEQ ID NO: 1002 - DNA, 72 bp, Homo sapiens
agaacacggatgagtgtcagccttcagcaggaatgcgcttgagcttctgtgtacctgttaattgcccaggga

SEQ ID NO: 1003 - DNA, 72 bp, Homo sapiens
gatttttccttctagggaggaatagatgaaatcaacgagctgtgactaatatctgctgttctctagcaaggg

SEQ ID NO: 1004 - DNA, 72 bp, Homo sapiens
tgttctagcacggaaaacaatacacaccagcttttcgcagtcagcctcagctctctgtctccgtttgatctc

SEQ ID NO: 1005 - DNA, 72 bp, Homo sapiens
ggtggagttttctttgtagctgggcccggaggtagcggaggtcttgctgatcaagcccgtgagccaggccca

SEQ ID NO: 1006 - DNA, 72 bp, Homo sapiens
cgctgctgtttgaattgggcagtgggcggtccaggcggagggcacggactctgaaaggagagaagtggtgtt

SEQ ID NO: 1007 - DNA, 72 bp, Homo sapiens
atcagtgagtctagagcaagcaggcacaagttccacggaggcacttgtggactaagatggtcattgaggcat

SEQ ID NO: 1008 - DNA, 72 bp, Homo sapiens
gttttacaaaaccctgcgggtcacctgtttactaccgtcagcctagaccggtttttccacctccttctgctg

SEQ ID NO: 1009 - DNA, 72 bp, Homo sapiens
cctagcccccacccccagcccccagcacctgtgtccggccctcgaggtcctcctgggccctcatctttgggg

SEQ ID NO: 1010 - DNA, 72 bp, Homo sapiens
tgaagagaatgaaactgaaatatgtagaacattctcggcctctctgaggatgggtggaatcagaacagagta

SEQ ID NO: 1011 - DNA, 72 bp, Homo sapiens
atatgtgaaagtccttagcaaatgcatgactcatacgtagtaaggcactcaaataaaagttttcatcagact

SEQ ID NO: 1012 - DNA, 72 bp, Homo sapiens
gcagctctctctgtcccagctttttagccccagaacgttgctatgaaagagactctaacagaagaggaaata

SEQ ID NO: 1013 - DNA, 72 bp, Homo sapiens
cccagctcacggttacttctcaggcttatggcacacgggcctctctaggtgcccacggtgtgtgccaggcag

SEQ ID NO: 1014 - DNA, 72 bp, Homo sapiens
ctcttccccctcctcctcctcttcctcctcttcctcgcccgctgatgacaaggagaagttatcctgactcac

SEQ ID NO: 1015 - DNA, 72 bp, Homo sapiens
gcccgggcacttgtcccaggtcccacactacagctcggcgggattcaaagcccggtttggaaggaaaagatt

SEQ ID NO: 1016 - DNA, 72 bp, Homo sapiens
catcatctttcagaacaggactaaacaaatagtctcgatacatggctttaggaaagaaaagcaagtgtgcac

SEQ ID NO: 1017 - DNA, 72 bp, Homo sapiens
aggacaccctccccaccagctgccagggtcactggcggtcaaaggcagctggtggggaaggcattggactcc

SEQ ID NO: 1018 - DNA, 72 bp, Homo sapiens
tgctccgtgtcctgtggatggtagctgccctgaagcgggactttgcagactgaagtgctgtctcttcagagg

SEQ ID NO: 1019 - DNA, 72 bp, Homo sapiens
ccggactgggaggtcccggaggccagggcctggcgcggcacctcctgtccctcacgtcgagggtattgtgtc

SEQ ID NO: 1020 - DNA, 72 bp, Homo sapiens
agcctagctgcatctggtctctggactctgcaacccgccagaaattgaatttaagtaaatggaacagggagg

SEQ ID NO: 1021 - DNA, 72 bp, Homo sapiens
tgttggcatggcatgtctgggcacctccaaggtggcgtggaggaggccgtgtggctccctggcccaggtccc

SEQ ID NO: 1022 - DNA, 72 bp, Homo sapiens
gatgcaaggatatatggcctgtttacacattccttcgctcgcagactgcatggcagtaatttaattcagcag

SEQ ID NO: 1023 - DNA, 72 bp, Homo sapiens
caagctcctaactccactaagtacagaagtggagccgtacagccatgaatgtcaggcatgttgtggggacta

SEQ ID NO: 1024 - DNA, 72 bp, Homo sapiens
tgtcccccaacccccacctcacaccccacaggccacggcagctcagacttccctacatcacaagctccctgt

SEQ ID NO: 1025 - DNA, 72 bp, Homo sapiens
atgagcatgaggctccacgggggcagtggctgtgacggtgagtgccacacagagctgcccacactggtggag

SEQ ID NO: 1026 - DNA, 72 bp, Homo sapiens
ctgcagagtaatgctgggactgtttgccaattgatcgaactagctaaatgattaatggggagatggcccatt

SEQ ID NO: 1027 - DNA, 72 bp, Homo sapiens
atccctgggtcggaagccaagggcttaagcccccacgttctttctggctcgcggcgggcacttcgtgcgccc

SEQ ID NO: 1028 - DNA, 72 bp, Homo sapiens
acaagcatatttacaaacatgctcaggcagatacccgccacgaataggaagagacacagacctagagtcaag

SEQ ID NO: 1029 - DNA, 72 bp, Homo sapiens
ttccctttctcagtccctgcttactaatggaaacacgggtccagaacctaaatccagtccctcctccttcat

SEQ ID NO: 1030 - DNA, 72 bp, Homo sapiens
atgtctcctgaaagtaaagcagaattttgtgtgtgcgtctgtcggatttctctggggagacagtgtgttcat

SEQ ID NO: 1031 - DNA, 72 bp, Homo sapiens
gacaagacctgtctcccagcattcctcattgttcccgggtctgcagagggcgtgagctatgctgcaggcggg

SEQ ID NO: 1032 - DNA, 72 bp, Homo sapiens
gagggacacggactggctaggcgctggtgagggggcggcggtcccagcagcaggcatgggagtggcggcgcg

SEQ ID NO: 1033 - DNA, 72 bp, Homo sapiens
ccaatgcaatgcaggtcattaacaattatcaacggcgatgcaaaaaccaaaatactttccttcttacaactt

SEQ ID NO: 1034 - DNA, 72 bp, Homo sapiens
ctgaccctgaggtcaagccatgtgggcaggggcagcgccagggtgacatttccctcatttccacatcatttc

SEQ ID NO: 1035 - DNA, 72 bp, Homo sapiens
gggtgggggcaggggggtgggggggaataaggctccgagaggttgagaaacagacccagggtcacacagctt

SEQ ID NO: 1036 - DNA, 72 bp, Homo sapiens
tagatcttgctcggttatgtgagattacaattcaccggtttccatcctgtatgaaacagaagttaaacagtt

SEQ ID NO: 1037 - DNA, 72 bp, Homo sapiens
aggacccatcaccctgggaagttttctccctttcccgtctttctccttctcaccttctcagaaagcgtagcg

SEQ ID NO: 1038 - DNA, 72 bp, Homo sapiens
tcttcacttccttctcttctctcccctttgtctttcgcagagctcagtgcctctgatgacagctccctgtca

SEQ ID NO: 1039 - DNA, 72 bp, Homo sapiens
tgacagagcagcatgagtcactgcccgccagggctcgctagagctccccctaggacagttgtcacagccctt

SEQ ID NO: 1040 - DNA, 72 bp, Homo sapiens
tgcggggctgcagtgatttgagaggggtcaggctccggcgctcatggggctctggctgtgctgacaggccct

SEQ ID NO: 1041 - DNA, 72 bp, Homo sapiens
aactagtgtgaagttaaaaaggacaaaaagatgaacgtgatatgaatgaaatctgagctttatcttaggagc

SEQ ID NO: 1042 - DNA, 72 bp, Homo sapiens
gagcagaattggtaagagtgcgtccattcaccaggcgtagacgctgcattcgaggaggcccccgggtcaccc

SEQ ID NO: 1043 - DNA, 72 bp, Homo sapiens
cccagactgcacaagggcagcatgagcctttcctccgactgtgtgtagggtgaccctgggcctctgggcctg

SEQ ID NO: 1044 - DNA, 72 bp, Homo sapiens
cttctggctggactgcaggcttgtttgcccacacgcgccccagtgagagcgaggcctccacgggcttccttc

SEQ ID NO: 1045 - DNA, 72 bp, Homo sapiens
gggacagcctccaagtcctgccacagaagagtccacgacactcactcccatctagaaacataaggatggtga

SEQ ID NO: 1046 - DNA, 72 bp, Homo sapiens
tgtgatccttttcccttgcgcaatgctttagatagcgctctggatgtccagcttgggaaaaggccacatgag

SEQ ID NO: 1047 - DNA, 72 bp, Homo sapiens
cacgctgagccaggccagcaggacgcccagcgagacgttggctgcacgccgcaccacggagcctggcagggg

SEQ ID NO: 1048 - DNA, 72 bp, Homo sapiens
agatgcggggtgggagaagccacgtgcgaaaggcacgcaccgtatgattccatggacatgaaacatccagaa

SEQ ID NO: 1049 - DNA, 72 bp, Homo sapiens
cataactccctaagggcctgagaagtcaataagaacgtggggattctgagtaatgtaatcagtaagatgact

SEQ ID NO: 1050 - DNA, 72 bp, Homo sapiens
cccgcaagacaagttacttctcaaagttggggagacggaggcggtgcttttaatgtctttccattttacaga

SEQ ID NO: 1051 - DNA, 72 bp, Homo sapiens
tattagagaacaactttaaaagggagatgaacagtcggctgtcaccacttagcacaaaagagagaaggtaac

SEQ ID NO: 1052 - DNA, 72 bp, Homo sapiens
tgggcacaggtccagcacttaactcagagggatgccgtgtgctgctgcatggtctgttaccaacatctcata

SEQ ID NO: 1053 - DNA, 72 bp, Homo sapiens
ctatctgggtgtgacctgacctctcccagggggaacgggctgctaagagttgggactgcaggggcttgtttc

SEQ ID NO: 1054 - DNA, 72 bp, Homo sapiens
aggcttcacgtggtctggtgacttcactggggttgcgcagagagctggtggcagatccaaggttatgatcct

SEQ ID NO: 1055 - DNA, 72 bp, Homo sapiens
gcaacttctctactttggggtggaaacggcttctccgttttgaaacgctagcggggaaaaaatgggggagaa

SEQ ID NO: 1056 - DNA, 72 bp, Homo sapiens
gacacaagactgggccctcataaactcagacagcccggcatgtcacctgttgtacctgccctttcagctctg

SEQ ID NO: 1057 - DNA, 72 bp, Homo sapiens
tgacaaaacctacctgcaaggagatggagaatgcccgtggcaatggtgggatataagcttcggcaaatgcaa

SEQ ID NO: 1058 - DNA, 72 bp, Homo sapiens
acgcggtagagtgatccttccacatgcagtcactgcgacacctgagaccctcccagactgattcagttgcgt

SEQ ID NO: 1059 - DNA, 72 bp, Homo sapiens
tatttattgagcacaagctcaatcaccgcattgaacgccaaatctggcaagcaaaatgcatttcctatctga

SEQ ID NO: 1060 - DNA, 72 bp, Homo sapiens
aactcactggcactgctagatcatgctatggtccccgagggccagggaggcaagtgtgctagtccaagtaaa

SEQ ID NO: 1061 - DNA, 72 bp, Homo sapiens
gaatctttcctggagcaaataaaacagtttcacaacgatgccatatttaaatgttatgtctctgcttatcca

SEQ ID NO: 1062 - DNA, 72 bp, Homo sapiens
ttcttcatactcagttgcagattgagtcgaactcccgtctccaaacccaggcttcctgcttaggaagaagaa

SEQ ID NO: 1063 - DNA, 72 bp, Homo sapiens
gcagggttcacagccggtctgtcgctcgccaaagccggtttgcccacacacctggcccccgcggtctccagt

SEQ ID NO: 1064 - DNA, 72 bp, Homo sapiens
caccctccaaaatagaaaaatttgtttttagaggccgggtcttgctctgtgactcaggacctgtggccacat

SEQ ID NO: 1065 - DNA, 72 bp, Homo sapiens
caggcccccgaagcccgggcaccaggctgcactctcggctgtgggcatgagacaagagcaccagatactgca

SEQ ID NO: 1066 - DNA, 72 bp, Homo sapiens
gctctgcaggcacagaggggagctgtcgcgctccgcggcccagggttccgcctggctggcaccacccctgga

SEQ ID NO: 1067 - DNA, 72 bp, Homo sapiens
gttgtagcctgaggtttttattaggtgcacactgccgctgcactgcaagtgaagcattagactgaaatgaga

SEQ ID NO: 1068 - DNA, 72 bp, Homo sapiens
ctggttcagaactgtgggcagccagcccaagagcacgcagctgtccaggggcagagtccacgtctggcttct

SEQ ID NO: 1069 - DNA, 72 bp, Homo sapiens
gaatgtgtgcagggagtgaggcttcctggggccatcgttctgtggcagatgcattactgaaggccagcatga

SEQ ID NO: 1070 - DNA, 72 bp, Homo sapiens
gcgggttggtcggggcgggagcggggctcggtgttcggggctgacggcgggggcgaggccatggttctcaca

SEQ ID NO: 1071 - DNA, 72 bp, Homo sapiens
ttcctgaaagctcttccaaagacatccaagtgggacgtgctgacgcagtcagatggaagcacagccccccaa

SEQ ID NO: 1072 - DNA, 72 bp, Homo sapiens
ctgcagcagatgggggcgcataccttgaagtacaccggttccaccttgtgcttgagggcgtgggctttcccc

SEQ ID NO: 1073 - DNA, 72 bp, Homo sapiens
aaaccaagtcccagagaggataaatgacttgcccacggtcacgtaacttgatgatgccaagctgatttcctg

SEQ ID NO: 1074 - DNA, 72 bp, Homo sapiens
aaagctccctcttaaaagcctccctctgcctcagtcgaggacttctaaatgctatgaagtttgctagggcta

SEQ ID NO: 1075 - DNA, 72 bp, Homo sapiens
tggtgatccgctccagggaacccgtaagaacacaacgcactgaacagagggaggatgtgggcagcagagacc

SEQ ID NO: 1076 - DNA, 72 bp, Homo sapiens
ctgcatagaacagagaggcacaaagtcaaggcatgcgagtaagggccggggatccggagaggacgcgagcca

SEQ ID NO: 1077 - DNA, 72 bp, Homo sapiens
actcttgtccatcaacatgtaatgaatgaatgtgacgcttgcataatagcattttttggagcactgttagag

SEQ ID NO: 1078 - DNA, 72 bp, Homo sapiens
taaaatttattgtgattgtgtttgacagcagatatcggagaaaattgctggatgagccaaggaccccaaggg

SEQ ID NO: 1079 - DNA, 72 bp, Homo sapiens
gacaaaagctgagtgtagcaaggaaacagacagaacgcctccagtagtggcccccgcctggctccaggattt

SEQ ID NO: 1080 - DNA, 72 bp, Homo sapiens
acagctctggagtcagactgtctgagctcatggcccgacaccccacactgcttgctggtgacagtgggtaag

SEQ ID NO: 1081 - DNA, 72 bp, Homo sapiens
caccgccggcaaagccttggctcgggcagaggctccgtctggcaggcagcacaacaagccatagtgtttcca

SEQ ID NO: 1082 - DNA, 72 bp, Homo sapiens
tcattgctgggcctctcccctgtttcccggatctgcggaagtggtcacaagggtcatccccgggacacgcgc

SEQ ID NO: 1083 - DNA, 72 bp, Homo sapiens
aaatgcatgcaaagaacatttcagaaagtacttaacgttgccaccctagataaaaagtttttcagtcagccc

SEQ ID NO: 1084 - DNA, 72 bp, Homo sapiens
atgacacaggacatacacacagttctgctgacacccggcactttattagtggggaaactcgccttggtctgg

SEQ ID NO: 1085 - DNA, 72 bp, Homo sapiens
cacagctggctctgtggaaactccttaccgacatccgtgaggtaacagacacaagacgttacaaggatcaca

SEQ ID NO: 1086 - DNA, 72 bp, Homo sapiens
cgtgttatccccgtcacgtggagttgtgtgtcctgcgaggagcacagcatttcagggcctagagcccctctc

SEQ ID NO: 1087 - DNA, 72 bp, Homo sapiens
cgaggagtcctgggggcctcacatcctgggaagggcgtcacaggacattacagggtgcagctgtaacactga

SEQ ID NO: 1088 - DNA, 72 bp, Homo sapiens
caggctgtggcccagctggagcacccagagctgggcgtggcaggcgggccgtcccacttcctcatgacaggc

SEQ ID NO: 1089 - DNA, 72 bp, Homo sapiens
caatctgtctttggactaacttctgcaagcccagacgaggcatttgggatgagaaattgctgccctctgtct

SEQ ID NO: 1090 - DNA, 72 bp, Homo sapiens
tgagccttggtggagtttccagccctttctcccctcgtagaggagccacttcatgttttagtaactcttcat

SEQ ID NO: 1091 - DNA, 72 bp, Homo sapiens
tgtacctctgtttcctcctcaacaagatggaagctcgagtgtttgtgttgctgtctcatccctgcccagggg

SEQ ID NO: 1092 - DNA, 72 bp, Homo sapiens
gtggaggcaggcaagattttgtgcaactggacgcacgggcagctcgcagcatttcctacctgcagtagaatt

SEQ ID NO: 1093 - DNA, 72 bp, Homo sapiens
gcctccggcggagaagctgggcaccacgtacttcacgtcaaagtcgcgagaggccgcgtagggggtgcgcgg

SEQ ID NO: 1094 - DNA, 72 bp, Homo sapiens
ctcccggctccggttgttccggggaccccagagagcgagtgatctgtgcctggcctgctggagcctccgtgc

SEQ ID NO: 1095 - DNA, 72 bp, Homo sapiens
ctgttttcttagttttggaaactgcaatttttactcgtatgtagggacactgacataggcacctggcagttg

SEQ ID NO: 1096 - DNA, 72 bp, Homo sapiens
ctgcttgtctttctcctgcagcatctggtccttgtcgcgcccctctagctccgcccgccccccagggctcag

SEQ ID NO: 1097 - DNA, 72 bp, Homo sapiens
ccactgggtcacggggcggggggatcagtcaagggcgacacacattgagtccttgggggtttgcaaggaaga

SEQ ID NO: 1098 - DNA, 72 bp, Homo sapiens
gtctgacctcagttgacctcgccgcaggcgccaggcgtcctcatttactgcgaggcattggggagtctactt

SEQ ID NO: 1099 - DNA, 72 bp, Homo sapiens
cctccctagtgttgctcgagaggcctgggtcatgacgccttcccttactcatgcattctcacggcacttgct

SEQ ID NO: 1100 - DNA, 72 bp, Homo sapiens
gcagtaccccaaggccaggccctcagctgtgggggcgtgtgctgagcaccaagcagagggagctgagcccgg

SEQ ID NO: 1101 - DNA, 72 bp, Homo sapiens
ggctgcaggtggctgctgccaaagctggggccttccgggctgggctgcgctggcagctgcatcactaactgg

SEQ ID NO: 1102 - DNA, 72 bp, Homo sapiens
attcccaccagcaacacatgagggttccactcctccgtgttcttgccaacattggtctttttgattctggcc

SEQ ID NO: 1103 - DNA, 72 bp, Homo sapiens
gggcagttaaagtgtgttcccaccccccacggatccgctgccactaggctgtgcgaaggcatttacctccct

SEQ ID NO: 1104 - DNA, 72 bp, Homo sapiens
agatatttggggaagagcattccaaacagaggaaacggcaagtacaaagaccctgaaacggcaagtacaaag

SEQ ID NO: 1105 - DNA, 72 bp, Homo sapiens
tttatacaagattactttaaatctgtagctaactacggtctgcttgtggtgaagtaaagtggttttagtcca

SEQ ID NO: 1106 - DNA, 72 bp, Homo sapiens
aggctttccttcctcccggtgacctggtcctgagccgcagcttcccttgcattgttccctgagtttgctctc

SEQ ID NO: 1107 - DNA, 72 bp, Homo sapiens
aggtaggtagaacagtttgtgaatgttcccaggggcgtgtgttagattgcacctaactattgggtgtggtag

SEQ ID NO: 1108 - DNA, 72 bp, Homo sapiens
ctctcctggtgatggccagagtcaggcctgctgggcgggaaatggcagttggcccaccccaaggcccagggg

SEQ ID NO: 1109 - DNA, 72 bp, Homo sapiens
tgcaaaactgaaactctgtacccagtaagtggtaacgcctcattcttcccctccctccttcccagcgactac

SEQ ID NO: 1110 - DNA, 72 bp, Homo sapiens
tttacgtggttggcctgggtcagaggggggcatcccgggcaaaggaaacaacatgagcaacacttgctgaag

SEQ ID NO: 1111 - DNA, 72 bp, Homo sapiens
ctcaaatatgtatataaagtgcttagcagaatgtccggaatgtagtaataactcagtgaatggtcttagctg

SEQ ID NO: 1112 - DNA, 72 bp, Homo sapiens
ggtgtgagaggaaagagtatgtgtcactgtgtatgcgtgacactccgggtctttttgaagggaggggttcgt

SEQ ID NO: 1113 - DNA, 72 bp, Homo sapiens
gtaaggcttgcctcttacagctggctcctagatcccgggcctcaccaccacttgtgctccaccacgcagggc

SEQ ID NO: 1114 - DNA, 72 bp, Homo sapiens
cgccatgtgcattgaggcattggagttggcaatgacgatggagctgccagagctgctgtctgccgggaggag

SEQ ID NO: 1115 - DNA, 72 bp, Homo sapiens
acaaagggatgattcacataccaggcgggatggagcgagatggcgcaagatttcatcacagtgctcaggatg

SEQ ID NO: 1116 - DNA, 72 bp, Homo sapiens
gactgggagaccgaccctgattttgtggtaggagccgccagcctttgctttcctctttcatgaagtggaagt

SEQ ID NO: 1117 - DNA, 72 bp, Homo sapiens
ccggtcacagcctgtgtgcttctcagcaggaaaggcggcctggaagtcactctgcccagcagaagctctgca

SEQ ID NO: 1118 - DNA, 72 bp, Homo sapiens
acttccctgaccctccccaagagaagcccaaagtgcggggccaacccagacagtcccacttaccaggtcttc

SEQ ID NO: 1119 - DNA, 72 bp, Homo sapiens
aactgttgtccacagcaacactacattagggctgccgggatgccttgctgcattgagcaaggattgcttctc

SEQ ID NO: 1120 - DNA, 72 bp, Homo sapiens
aggggtgagtccacagagttgcttcatggaaaagtcggtcctgtgggagtcagaagacctgagggccaccct

SEQ ID NO: 1121 - DNA, 72 bp, Homo sapiens
tacaattagtccctctcccttctgcgagattgtaccgttttgctcatttttcttctattctgattgacacat

SEQ ID NO: 1122 - DNA, 72 bp, Homo sapiens
ctaagccctgctgtctgcagggactctaggattgccgacatgagcgcaccaacactgaaatgatgagtcagg

SEQ ID NO: 1123 - DNA, 72 bp, Homo sapiens
agcatgaagcgtgccagctctctgaatgtccttaacgtgggtggcaaggctgctgaagatcgctttcaagta

SEQ ID NO: 1124 - DNA, 72 bp, Homo sapiens
ttcatactgagaggctgttttgttttacatagggccgaaaggacactttgacagaatagacttatgcaaact

SEQ ID NO: 1125 - DNA, 72 bp, Homo sapiens
attaacagatgttccagaaactgttactgaacattcggcttgatgctgtgggcttgtctgcatcttgcaact

SEQ ID NO: 1126 - DNA, 72 bp, Homo sapiens
aggaactaccaaagccacggatcagctgagttacccgggctaatagcaggaggaaacagtgtcagagaggga

SEQ ID NO: 1127 - DNA, 72 bp, Homo sapiens
tttagacagatgcggggcttccctcacacccctgccgtcctctcctcctcctccctctcaccctctgggctg

SEQ ID NO: 1128 - DNA, 72 bp, Homo sapiens
agccagcatcaggcaaagttgcccaagacctgctccgccagccccttgcagctgggctgggcttccaggagc

SEQ ID NO: 1129 - DNA, 72 bp, Homo sapiens
aaccaaaagaattcataagaacatcaggcctgggccggtgggcacctctccctctgtctgctcagggactcc

SEQ ID NO: 1130 - DNA, 72 bp, Homo sapiens
ttattctacactcaaggaaccgaagctcagagatgcgcacatcttgcccaacccacacagcaggtggtggtg

SEQ ID NO: 1131 - DNA, 72 bp, Homo sapiens
ccttaggtccttttcctgccctgcacacagtaacccgagaagactagaaaaccacattttctgggcctctcc

SEQ ID NO: 1132 - DNA, 72 bp, Homo sapiens
gggacagggtgtttgctttcctgagaggacttctccggagttggggcatctccagccttgcagcttctcctg

SEQ ID NO: 1133 - DNA, 72 bp, Homo sapiens
cctgctccttttacacaccagtggttttctttgcacgcaacccttcatcagtcaaacattcactaaatgttg

SEQ ID NO: 1134 - DNA, 72 bp, Homo sapiens
atcacagaaagtcccaccctggtagaactcctgggcgtgggtcagagcctggacttgcgtcacagcaggacc

SEQ ID NO: 1135 - DNA, 72 bp, Homo sapiens
gctgtctgcagggactctaggattgccgacatgagcgcaccaacactgaaatgatgagtcaggttgattatg

SEQ ID NO: 1136 - DNA, 72 bp, Homo sapiens
cctccgtggttaggtctggttttagctttgatgaccgtgccctgccccaccctgcctggtggcctggggagg

SEQ ID NO: 1137 - DNA, 72 bp, Homo sapiens
aagtgtgccgtggtcgactgaaacagcctggccgccgagaggtgtttgtggccatcaagacgctgaaggtgg

SEQ ID NO: 1138 - DNA, 72 bp, Homo sapiens
ctgccacaacctctccctgggagctgggaattgagcgcagccagctggactctggttagtgggtttcataac

SEQ ID NO: 1139 - DNA, 72 bp, Homo sapiens
ggaatgggaagacagcctctcagatgagaggtgtgcggagtgattgctgtgaggaattgctcaataggaaag

SEQ ID NO: 1140 - DNA, 72 bp, Homo sapiens
tccccacctgtgagcggcgggggaaaccgatcagccgcgcccctcgaccccggaagctccctggggacctca

SEQ ID NO: 1141 - DNA, 72 bp, Homo sapiens
gacgaccttgctggccacgtgggccaagccgggggcgctcttagaatgtggatctgagcagggagaggtgtg

SEQ ID NO: 1142 - DNA, 72 bp, Homo sapiens
tgacttgagggggccccacctggtgcccaagcccacgtaatgaactactaccaaccacaaatacttgaggca

SEQ ID NO: 1143 - DNA, 72 bp, Homo sapiens
gctgtctctttgaggttgtcttggggacagttccccgcaaaggtcattcctagcttttgaggtcaatgttgg

SEQ ID NO: 1144 - DNA, 72 bp, Homo sapiens
tacatctctttcctgactgttgggtgagccctcctcggatgcttgcttctggctacacgcccctttaccctt

SEQ ID NO: 1145 - DNA, 72 bp, Homo sapiens
tgagaagcaggaaccacactgcagcctcacaaagccgtaggagacaattacaatcccaccaaggggccaatc

SEQ ID NO: 1146 - DNA, 72 bp, Homo sapiens
gctagaaaacaacaaagcatttttagtctggtcagcgtaattttttagggaatatttactgcattgcgtcat

SEQ ID NO: 1147 - DNA, 72 bp, Homo sapiens
acctggacacaatgaggcccagtgcaaggggcgggcgagagcctggccaggagccagggccctggtctgaat

SEQ ID NO: 1148 - DNA, 72 bp, Homo sapiens
atctctacccactactgactagtgacctgtttcaccggcccagcaagaagatgacccagagccttagccaaa

SEQ ID NO: 1149 - DNA, 72 bp, Homo sapiens
agatctgacttcgctgattaagtggatgtatgagccgatcctccccagaagctgggatcagcttccccatct

SEQ ID NO: 1150 - DNA, 72 bp, Homo sapiens
ccccttgtcccggaggctggaggggaagacccaggcggctgcgctttggaggctggaccatcgtggggcttg

SEQ ID NO: 1151 - DNA, 72 bp, Homo sapiens
gggacgtgaccccccccccaggctgacccgttcctcgctctgtcgtccccaggtggaggaggagctgacgca

SEQ ID NO: 1152 - DNA, 72 bp, Homo sapiens
tctcatcttcccagacgcctggtcgcgcgcggctgcgttagcctcctctgggcctcttcccgagtctctggc

SEQ ID NO: 1153 - DNA, 72 bp, Homo sapiens
cccacgtgtcgtccttgttctctcctcattgctgccgtcactgtgtgctgcgcatgccctgcagttacccca

SEQ ID NO: 1154 - DNA, 72 bp, Homo sapiens
ccctaggattcctggagtgggtgtgcccacgcttccggcccagacgtgggtggagggatcccaccctgccag

SEQ ID NO: 1155 - DNA, 72 bp, Homo sapiens
agatttgtaaagcagaggttgaaactgggctaccacgggtccagagaagtgttcccagctcttgttctcttg

SEQ ID NO: 1156 - DNA, 72 bp, Homo sapiens
agtggggaggcccccacttgaatttgcatagttgccgccctggcctgaagggaagagtctacaaggtttata

SEQ ID NO: 1157 - DNA, 72 bp, Homo sapiens
gaccacatgacatgggaatgttcgtagaagatgcacgtagtcaccatgaggaggggaaagaacccagtcatc

SEQ ID NO: 1158 - DNA, 72 bp, Homo sapiens
gagttcctctgaggctctccttggctagtagatgccgtcttctccctgtgtcctcaggtggccttccctctg

SEQ ID NO: 1159 - DNA, 72 bp, Homo sapiens
tttgtgtggagtcacaaatggtgttcacatcataacgtcaccagactctccagccacacccattgtacacgc

SEQ ID NO: 1160 - DNA, 72 bp, Homo sapiens
tctgcgggtcccttgggggtcgatgatcacccttccggacccccgagaccttgcccctgacgtcttcactgg

SEQ ID NO: 1161 - DNA, 72 bp, Homo sapiens
ggctggcctgggtcggcctctggagtatggtctggcgggtgccccctttcttgctccccatcctcttcttgg

SEQ ID NO: 1162 - DNA, 72 bp, Homo sapiens
tccaactgccccatgctgcctgagaaggcactgcacggccacccccaactgccccgcactgtccctacccgg

SEQ ID NO: 1163 - DNA, 72 bp, Homo sapiens
gtctgacctgtcatcatagtaactggagtcgtggccggatcctgagagttcagtcacttcacttcctccgac

SEQ ID NO: 1164 - DNA, 72 bp, Homo sapiens
aactgccccctcactatcctccagtgcacatcccacgcgcgcatcagctgtgactaaggttcctctggccag

SEQ ID NO: 1165 - DNA, 72 bp, Homo sapiens
ctgaggtccctgaccaccgccttgggtccagccctcgtccagggggcggcggtgcaggggagaccgcgcggc

SEQ ID NO: 1166 - DNA, 72 bp, Homo sapiens
cccatgggaacggcccggcagcaagctggtgacagcgagcctccatcgccgggaaacagagctgcaggtgtt

SEQ ID NO: 1167 - DNA, 72 bp, Homo sapiens
aagtcagaaagatcccccttcagcttcctctgccacgtccctgctgtcagagcttcctttgaggaacccttt

SEQ ID NO: 1168 - DNA, 72 bp, Homo sapiens
aaaaagggaagagctctttctgcttatgactgggacgctgttattcatcaagctctggtgtttcaagtgagt

SEQ ID NO: 1169 - DNA, 72 bp, Homo sapiens
tcaagtggagtcactgcctctgtccctctggtcagcgtgatggccagaggcctgggggccccccactgggtg

SEQ ID NO: 1170 - DNA, 72 bp, Homo sapiens
ggaccccgtggagacctgctggttctgggaggcggcgggggtcctgccctgccacggctccttgggaaaagg

SEQ ID NO: 1171 - DNA, 72 bp, Homo sapiens
accctcaagggtgggcagagcccaccctgccttcccggtgctgtggaaaccaccctgccagctagcagcacc

SEQ ID NO: 1172 - DNA, 72 bp, Homo sapiens
tgtgggtggaagccaggaggcgattactcaagctccgaaactgaatgtgctgagcccacagtcccgcaggag

SEQ ID NO: 1173 - DNA, 72 bp, Homo sapiens
gcccaagtcccccacactcagtgcagtgatgagtgcggaagtgaaggtgacagggcagaaccaggagcaatt

SEQ ID NO: 1174 - DNA, 72 bp, Homo sapiens
ggatccagccaggctcccgcgcagtcctcagggggcgtggcccggctcgtgggggcggagtccatggggggc

SEQ ID NO: 1175 - DNA, 72 bp, Homo sapiens
gagaaagccagtgttcttcagttactgcagctcggcgaagaatcccactgcagggcactagggaggccggtc

SEQ ID NO: 1176 - DNA, 72 bp, Homo sapiens
gggtccgtggcaaccacaaagcacctgcaggccagcgcttcccgatgagcagaggcgggggctggcacctgg

SEQ ID NO: 1177 - DNA, 72 bp, Homo sapiens
tcctccatggagcctgggtcctcagctggcggatccgtgaaactcatctctggggagcattggcttctgtgg

SEQ ID NO: 1178 - DNA, 72 bp, Homo sapiens
ctgttgtaaggatggaggatacaaagcagaggatgcgctctcaaattcagttcttcaccgctgcgtccacat

SEQ ID NO: 1179 - DNA, 72 bp, Homo sapiens
gggcctcagattgagtaagccccatgctcccggcacgaggctgagccccaggaatcactcaacaggcatgag

SEQ ID NO: 1180 - DNA, 72 bp, Homo sapiens
tgttgatgaaatctccagcgcagctgtaaactcttcgagtgtggctgctgagacttacttgtccttgagtgc

SEQ ID NO: 1181 - DNA, 72 bp, Homo sapiens
gcaccaaggctgtcatccagggactggagactctgcgtggggagcatcgtgccctgctggctcctctggttg

SEQ ID NO: 1182 - DNA, 72 bp, Homo sapiens
taagctttgagggtctcagccctgccctcttccaccggctgtccctcctgagtctgcgtgagaacaatgtgg

SEQ ID NO: 1183 - DNA, 72 bp, Homo sapiens
actgtgccagatgacccttcttgcaaaggggtgggcgggaaggccccccatgcagccaggcagtgcctggat

SEQ ID NO: 1184 - DNA, 72 bp, Homo sapiens
agcacagggcttagcacagaattccaggcctgtcccgcacccagccagctgcccccacttcctctcccacat

SEQ ID NO: 1185 - DNA, 72 bp, Homo sapiens
cccatccaatgtttagaaagcctggggatgtgccacgtcccccagggatccagcacgcacccaaagagacac

SEQ ID NO: 1186 - DNA, 72 bp, Homo sapiens
cagctgacggctgccacctctctagaggcacctggcggggagcctctcaacataagacagtgaccagtctgg

SEQ ID NO: 1187 - DNA, 72 bp, Homo sapiens
aagaggcccagttggctgtgaactccccaggaaaccgaagccccatcggggacagggatgagaccaaagtcc

SEQ ID NO: 1188 - DNA, 72 bp, Homo sapiens
tattcgaggggggaaaggttagatttagaactaagcgtgtgggaagagtaagtagttgataaaacagaagaa

SEQ ID NO: 1189 - DNA, 72 bp, Homo sapiens
acctaagcatttgcctgaactcaccatgtcccttacgtccagtgccaagcaatctgagatctagacattacc

SEQ ID NO: 1190 - DNA, 72 bp, Homo sapiens
cctcagtcaaaacaagagattgtggtggtgcctgccggttcaaaaatggcacatgtttcttttgcctcttct

SEQ ID NO: 1191 - DNA, 72 bp, Homo sapiens
acacaggtctatacatggggcttcatgcccttctccggctctggagtaggaggcagaggtgtttccagcccc

SEQ ID NO: 1192 - DNA, 72 bp, Homo sapiens
tgcgcaggctaaagtacaatggcacgatcctagctcgttgcagcctcaaacccctgggctcagactatcctc

SEQ ID NO: 1193 - DNA, 72 bp, Homo sapiens
tcagtctcctgtggaattccacggtcagccaggctcgcagccactgttctgcccgatgcttctctccccttc

SEQ ID NO: 1194 - DNA, 72 bp, Homo sapiens
gaagcagccagccgctcacccgctcctccttcttgcgcatccagctgtacttcttgttgggcttcagctccc

SEQ ID NO: 1195 - DNA, 72 bp, Homo sapiens
tggcactggggtgccggccaggagctgcagagctacgcatgaataaaaagaggctgtgctcaggcggcggcg

SEQ ID NO: 1196 - DNA, 72 bp, Homo sapiens
ctttccagctcttggcgtcagctctagacctaaggcggacggaggaaggggtcggggtggcggaggaccccg

SEQ ID NO: 1197 - DNA, 72 bp, Homo sapiens
cagctgggcccagcctaggttgtactgctgggaagcggctgactcaacccctccctgtggccacagctggac

SEQ ID NO: 1198 - DNA, 72 bp, Homo sapiens
gcaattccatgatgaggaacagtgtcttgctctgtcgcccaggctgaagtgcagtgttgtgatctcagctca

SEQ ID NO: 1199 - DNA, 72 bp, Homo sapiens
gtgagttcttccaaaccagctgcaggataggtcctcggcccttccaggaagggaagaaggaagggcagtcgt

SEQ ID NO: 1200 - DNA, 72 bp, Homo sapiens
agccaggctcaggaaccaggcaggcagacacaccccggccccagccccgcatcgctgcgcggccttccccct

SEQ ID NO: 1201 - DNA, 72 bp, Homo sapiens
ctaaaaccctgttactctccaatgaaccagggaggcgggctcctctctgcgcctatcccttgagaattctgt

SEQ ID NO: 1202 - DNA, 72 bp, Homo sapiens
tgtggtgggcttgctggagaaataggctcttctcacgtgagaacagcatccttccaatctagagctcctggc

SEQ ID NO: 1203 - DNA, 72 bp, Homo sapiens
caggggaaagtatgagggaggggataaggagatgacggagaaagaataactacactctgggaactgaaagaa

SEQ ID NO: 1204 - DNA, 72 bp, Homo sapiens
catagtattttcttttttttcttgctgtgactgcacgttacgccatacatggcattcaggacgcagaggaat

SEQ ID NO: 1205 - DNA, 72 bp, Homo sapiens
atgctggttatattggccgagggaagcttgctgatcggaaaacacagggctgagaaacctctggaaactcgt

SEQ ID NO: 1206 - DNA, 72 bp, Homo sapiens
atgtatgtgatatgtcagcatggacagttgtcactcgtggggctaagtgacaggttttaataagtagcactt

SEQ ID NO: 1207 - DNA, 72 bp, Homo sapiens
cctgtgcacccagtggttgagcaagaaggatgtgacgggacccaggaaggcagcagaagccagcaccaacag

SEQ ID NO: 1208 - DNA, 72 bp, Homo sapiens
gtcctgagctggtcagcccaggcggaagagccacccgaatccaaccccacagtgaatagggaaggggctgag

SEQ ID NO: 1209 - DNA, 72 bp, Homo sapiens
tgattggctgatggccgggggctgggtctgagaggcggcccctgaatggtttaacggaggaaattacaagat

SEQ ID NO: 1210 - DNA, 72 bp, Homo sapiens
ctttttcttgtctgagcctcacctggcacctggcccgagacactcctgagatgggattaagcaaggagcagg

SEQ ID NO: 1211 - DNA, 72 bp, Homo sapiens
ctgtggaagcattgctaaacttgaaccacactcaacgttattcaatgagtagactaacttcatagaaagttt

SEQ ID NO: 1212 - DNA, 72 bp, Homo sapiens
agcacatactttgtgctgtctgaaattaagtagcacggtgtggcaatcaaatgcgcaagacttagccggttt

SEQ ID NO: 1213 - DNA, 72 bp, Homo sapiens
gtgcaggcacttctgggacttggcgttctacaggacgccccagttggctgactcgggccgccagcttgctca

SEQ ID NO: 1214 - DNA, 72 bp, Homo sapiens
ctggggaccatcacgaactgtcctagagcgcaatccgaatgcaagcaggggagaggaggccccagcaggctg

SEQ ID NO: 1215 - DNA, 72 bp, Homo sapiens
ctccctcctccctctgccgcctgagtcagagaagccgggatgtgttcaaaatcaagcaatgtaattagcagg

SEQ ID NO: 1216 - DNA, 72 bp, Homo sapiens
ccacagtcaagtacaccctcaataccacagcaccacgctgactaagcatgactagctctttcaaacagttat

SEQ ID NO: 1217 - DNA, 72 bp, Homo sapiens
ggaagtaggtaggtcaaaaaaaaaaaggaaagcctcgcccgccccccagtaatttgtcaaaagcaagtggga

SEQ ID NO: 1218 - DNA, 72 bp, Homo sapiens
ttcggctttctccctgggcactgccttcaggaagacgttgagaattgaccttacacaatcccagcgccctcc

SEQ ID NO: 1219 - DNA, 72 bp, Homo sapiens
tctccagtctctaccactcattgtttgcaacatgacgtaatgtcaacagaccacagagaagttagcaacagg

SEQ ID NO: 1220 - DNA, 72 bp, Homo sapiens
ggccagggcccacagggtctctgtgaaggcctccacgaggtgagggccagaagcagccaggaagccctccat

SEQ ID NO: 1221 - DNA, 72 bp, Homo sapiens
acctcaggcagcaggccttgcagccactggggctccggaccctgccaacacctaattctgggaggaagactc

SEQ ID NO: 1222 - DNA, 72 bp, Homo sapiens
tgcagtggtttaagaggccagaggccttcgcagagcgcatgcctagttccccgccccctccgagccgggcgc

SEQ ID NO: 1223 - DNA, 72 bp, Homo sapiens
cctgtgtgcggcccactgtctaactaggtcagcctcgggcacagctccttttgacagtttgctccccagggc

SEQ ID NO: 1224 - DNA, 72 bp, Homo sapiens
tcttggacctcatccccagttcacttttggccatgcgtttatcagtcgaacacttcctaggaatctctctgt

SEQ ID NO: 1225 - DNA, 72 bp, Homo sapiens
cagaggcaaaatctaggtgaggctggtcacctaagcgagtacagctgggtcaggccaggctgcctcagcccc

SEQ ID NO: 1226 - DNA, 72 bp, Homo sapiens
atctcacagacaaggaaaccacatggctagaaacacgtggaagtccgcttcagcacatcaagagattaagga

SEQ ID NO: 1227 - DNA, 72 bp, Homo sapiens
aggcaaaacggaagcttgtgaaaccaggaagtggacgggaacctagtttggccagtgggatactgctggttt

SEQ ID NO: 1228 - DNA, 72 bp, Homo sapiens
gcaggaagtggccacagcaccatcactggaggccacgcggagtctgaggacagcagctttcccccctatgct

SEQ ID NO: 1229 - DNA, 72 bp, Homo sapiens
attaaaggtgtcctgcggcagccgcacggcagcaccgtccaatttcagtatcttcttatctgttccattcct

SEQ ID NO: 1230 - DNA, 72 bp, Homo sapiens
ttgtcctgatagagggcggattcatccagggctttcggctgctggggccccaggggcacaggaaggggggga

SEQ ID NO: 1231 - DNA, 72 bp, Homo sapiens
gcctcgttcagtgagtcagcacgggacctggagctcggggacccctcacagccaggccagtgcacacttgga

SEQ ID NO: 1232 - DNA, 72 bp, Homo sapiens
caaagggaggggcgatggagcagaggccagcaggccgagagctcaggccatgcagagcctgggaggctaagc

SEQ ID NO: 1233 - DNA, 72 bp, Homo sapiens
gcgtgcagccaactctgggtgggggcattgggccccgtgctctcctggtggagttgggggcacacagaacga

SEQ ID NO: 1234 - DNA, 72 bp, Homo sapiens
tccttgaaggcttgtgactcatagctgctgtgtaacgtgtggcacccccagacaggaacacatcttgcaaat

SEQ ID NO: 1235 - DNA, 72 bp, Homo sapiens
ggtctccatctggttccttgagggtgtggcctctgcgtcctgctatcacccttccttgtctaaaccttccca

SEQ ID NO: 1236 - DNA, 72 bp, Homo sapiens
gctgccaggaaacaactaaggcttttaaatgcaggcgttttaaaccgggggcaaggaacattactgcttgaa

SEQ ID NO: 1237 - DNA, 72 bp, Homo sapiens
gctctgggtaagatgtccttcctcccgggagcggtcgtttgggagtgctccgtgggttaagcaaacgcaagc

SEQ ID NO: 1238 - DNA, 72 bp, Homo sapiens
attctagcctgggtttcaacttcaaggagcttcagcgcccctcactcccttgccctgaaagctggctaaact

SEQ ID NO: 1239 - DNA, 72 bp, Homo sapiens
gcagaagagatgaataaagtcaaacaactgttttacggtagaagcacttcaaagtagtgcttgagagctctg

SEQ ID NO: 1240 - DNA, 72 bp, Homo sapiens
aagcaaccagccctgagcttcctggggtagcaagacgactgcagacagaggaacttgtatttgcccccacct

SEQ ID NO: 1241 - DNA, 72 bp, Homo sapiens
caagcctcttgaaagagagagtatagtgtagtaaccgtatggggtgttcgtgtcccagcttggcagcttaac

SEQ ID NO: 1242 - DNA, 72 bp, Homo sapiens
tgcttgtcaactgatccagcaggggcgcctggcctcgtgtctgggaaaagctgtggtaattgactattctgc

SEQ ID NO: 1243 - DNA, 72 bp, Homo sapiens
tacccagtggttcctttgcacacaggcagggccagcggccaggccctcatccaccagagtagaccccagcac

SEQ ID NO: 1244 - DNA, 72 bp, Homo sapiens
ctgttatgcaaatgaacttagccagaacgagcaggcggtattttaaagacccattcaaagtctgatacatct

SEQ ID NO: 1245 - DNA, 72 bp, Homo sapiens
tctaccagggccgagttctgaggttgcagagaagccgtgccaagctgaggcactctgaaaacctgttccagc

SEQ ID NO: 1246 - DNA, 72 bp, Homo sapiens
tccaaggtgtgttctctcggccactccaggggaggcgtgaccacccccaccccctaacgatacagatgagga

SEQ ID NO: 1247 - DNA, 72 bp, Homo sapiens
ggcttcttgttcacccaccttggaaacgccaggtgcggacttgatttttccagagttgagatgatggtactt

SEQ ID NO: 1248 - DNA, 72 bp, Homo sapiens
ctcctttctcgaagtctggggctgaggctaaggagcggacagtgccccctcctggctctgcaacaaaacgac

SEQ ID NO: 1249 - DNA, 72 bp, Homo sapiens
ccgaatttcttctcctagaaggccagcaacacacccggctaagccacagtagaggcggccacggccaagggg

SEQ ID NO: 1250 - DNA, 72 bp, Homo sapiens
tctcatcctggtttaagtccacggcctggtaagcacggcccgccccttctcacttcctactgtgctctcacc

SEQ ID NO: 1251 - DNA, 72 bp, Homo sapiens
aagtgtccaccagtctacagaggaggaaaaagagacgggctgtttctatgtagcaggatcggcccagcttcg

SEQ ID NO: 1252 - DNA, 72 bp, Homo sapiens
atccaacctcaggaagtcaagtcctctgtccccagcgctcccacccccatcccactcccactgtgaacccac

SEQ ID NO: 1253 - DNA, 72 bp, Homo sapiens
gggagtgttctatgagctgtgtccctggaactggacgagggcaccaccttgcatattaccagcactatcccc

SEQ ID NO: 1254 - DNA, 72 bp, Homo sapiens
ccactctgctgcacgggaccttgtgtggtcccaggcgtggccagacccagacgtcctggagatctcaatgca

SEQ ID NO: 1255 - DNA, 72 bp, Homo sapiens
taacgctgattgcccaacaggctctgggctgcgggcgcccctccaccccctggcagcttctggagggggcca

SEQ ID NO: 1256 - DNA, 72 bp, Homo sapiens
ccctccctgggaacgaccggaagaagagctggccccgctttgcttcagataaatgctccaattagctgcctg

SEQ ID NO: 1257 - DNA, 72 bp, Homo sapiens
acccctgctgcacagcttcccctagtggatttggccgtaaatgagcagactggtgcctccagagcagccctc

SEQ ID NO: 1258 - DNA, 72 bp, Homo sapiens
ataggttttatatcccaggggccagcaagacatgccggttagcacaccctgtttcctcactttggttgagag

SEQ ID NO: 1259 - DNA, 72 bp, Homo sapiens
tacccacgtgccacccccagacaatggacaagggccggctgcagaggctgactcactctctgagggttagcc

SEQ ID NO: 1260 - DNA, 72 bp, Homo sapiens
ccccgggttgtgggttttagggaagggaagggaagcgaggaaggacttgtgagaggaagtcctaaaggccac

SEQ ID NO: 1261 - DNA, 72 bp, Homo sapiens
ggattaggggcttctctcggggccgggctggcgcccgggggactgcctcagtatctgaccaacactcatcct

SEQ ID NO: 1262 - DNA, 72 bp, Homo sapiens
catgtgcccccacacccctcccaaaccctggacctcgcctccacactagaccacagacagatgggcaagtct

SEQ ID NO: 1263 - DNA, 72 bp, Homo sapiens
gtgattttcccgcccctgtcattgacatcttggcccggctaggacaggaaccccccttgctgggggaagagg

SEQ ID NO: 1264 - DNA, 72 bp, Homo sapiens
catggcccactggggcagcaccacctccctgaccccgttgggtggaggacccattaaaagtggcagcatgac

SEQ ID NO: 1265 - DNA, 72 bp, Homo sapiens
ttgacactcaaaaggaagtgattacacaagggaatcgttgcaagatcattgcaggttatcttagaaatctga

SEQ ID NO: 1266 - DNA, 72 bp, Homo sapiens
tccactcggcctgggaggttctggattttggctgtcgagggagtttgcctgcctctccagagaaagatggtc

SEQ ID NO: 1267 - DNA, 72 bp, Homo sapiens
cgccccttttcctgttgcaaagagaaaggggccagcgacccgtgaagagccaggaatgcatccgagggagct

SEQ ID NO: 1268 - DNA, 72 bp, Homo sapiens
gcagtgtatgaacccagggcactgtggggacagggcgacgtgtgtccaggcgtttgccggtaaggaatgcgt

SEQ ID NO: 1269 - DNA, 72 bp, Homo sapiens
ataacctgagatgatagatttaaacaggatatttacgttctgctacaattgactgataacacttgaagtgta

SEQ ID NO: 1270 - DNA, 72 bp, Homo sapiens
accgaaccatgtagaaatactgcatacaaaatgcacgcacctcaaaatacctaccagctgtctcagttcacc

SEQ ID NO: 1271 - DNA, 72 bp, Homo sapiens
ttcataaagaaaaatttgagtctctctttgcaggtcgagtgctgcaattaaaaagatgcatgtaaagccggg

SEQ ID NO: 1272 - DNA, 72 bp, Homo sapiens
gattatgctagtttaaacaccaaaagggagccagccggagagacattaaaatgagtagcttcagtaatgtaa

SEQ ID NO: 1273 - DNA, 72 bp, Homo sapiens
cggggggtactctccacggtgactgccctgctcctcgcggtgcagctccacgctgaccttggtctccacctt

SEQ ID NO: 1274 - DNA, 72 bp, Homo sapiens
ggggtcctcactgtcactctcagccaggctctggtcgggccagccggccggaacgtggttggccacagcgtc

SEQ ID NO: 1275 - DNA, 72 bp, Homo sapiens
gtccgtggccagctgctgctcgatgacgtcatccccgtagatggccacgatggccacgcagatgaaaaggtg

SEQ ID NO: 1276 - DNA, 72 bp, Homo sapiens
cagcaagccgactgcccggcggggggtgggcagcccgggagccacagggctccccagagacagccgcttggg

SEQ ID NO: 1277 - DNA, 72 bp, Homo sapiens
agagagagagagagagatgtcacggtgtgaatgcacgcaaaaatgttataaaaatgagcactcccagcagcc

SEQ ID NO: 1278 - DNA, 72 bp, Homo sapiens
cttcaaagatgacccccctgcatagaatcatgtgtcgtcacacaaatgcacccttgcataaccctttctttt

SEQ ID NO: 1279 - DNA, 72 bp, Homo sapiens
tccttggaggttctatatcacagccctttagagatcggtggtgctgaagggcagggatcttattccaccttc

SEQ ID NO: 1280 - DNA, 72 bp, Homo sapiens
ccaactggtcccttcggcagtgtgtcctcctgctgcgtgggctggggcctgagcacaggaaagggagttcag

SEQ ID NO: 1281 - DNA, 72 bp, Homo sapiens
ccaggatgtggctttacatgcagaaaacagggacacgatgttttcatgaagcaaaccaaagaaaggacaaga

SEQ ID NO: 1282 - DNA, 72 bp, Homo sapiens
gcccggctccctccagggctggtgcaatgcagtggcgcccaccagcggccgccctccggggcccgcgtgggc

SEQ ID NO: 1283 - DNA, 72 bp, Homo sapiens
gcttctctagagcagggactgtttcttctttcacccgggtaagccctgcatcagctgctggcacccggcacc

SEQ ID NO: 1284 - DNA, 72 bp, Homo sapiens
gcagagtgactcaggctcccacagaggcctgtccacgcaagggccaggaagagcagagaggccccagagcct

SEQ ID NO: 1285 - DNA, 72 bp, Homo sapiens
ctggactcagcctggtattcttgtcacaaggtcatcgcctaggtgagctcagctcagcgtgaaacaaaacag

SEQ ID NO: 1286 - DNA, 72 bp, Homo sapiens
acatgctgagggtgcaagggactcttagactttctcgctggttgactggcagagcaacttctggacccagca

SEQ ID NO: 1287 - DNA, 72 bp, Homo sapiens
cacatctcattatgcaagagggcacgggtcccctccgcgccggggagcagcaacacgccttagcacatattt

SEQ ID NO: 1288 - DNA, 72 bp, Homo sapiens
acacgagccccggtggtgggatgcagttagctgaacgccaggctgagcagggtccgaaaattaggggaataa

SEQ ID NO: 1289 - DNA, 72 bp, Homo sapiens
aacatgcaggaacttccctctccctccagtgacctcgtatggtctgttgtaggctcactgtgtcccttcact

SEQ ID NO: 1290 - DNA, 72 bp, Homo sapiens
tgtacagctggaggtagggtaggtggctgctgagacgtagggcagttcccaggtagggaacaaaacatggtt

SEQ ID NO: 1291 - DNA, 72 bp, Homo sapiens
gctggcactggctcaggctttcacacacacacacgcgcacacacacacacacacacacacggacaggcaccc

SEQ ID NO: 1292 - DNA, 72 bp, Homo sapiens
ccaggggatccctgtctcagccacaaccccagtgccgatgacaaagcaggagctgccaggccagagggccag

SEQ ID NO: 1293 - DNA, 72 bp, Homo sapiens
agcactgagtgcagcccccaggggagtactgtgcacgggctccatggcgacatcaccactatgtatttactg

SEQ ID NO: 1294 - DNA, 72 bp, Homo sapiens
ctatcattctctaagacctagaaatctactttcaccggaaggcacagacttcacagaagaattgagcaagag

SEQ ID NO: 1295 - DNA, 72 bp, Homo sapiens
ctgatagctaaggatttttcaactttattctcttacgtatttttcaactgtaaattattgggcttttaaatc

SEQ ID NO: 1296 - DNA, 72 bp, Homo sapiens
ctgcatgttgtgaaatcagggctaaataaacaacacgagaggtcacagttattctttaatgatgtgttccat

SEQ ID NO: 1297 - DNA, 72 bp, Homo sapiens
aggtggctcggcagagttggagggggctggtgaaacgaggaggaattgcaggctgggcaaagtgttcctgca

SEQ ID NO: 1298 - DNA, 72 bp, Homo sapiens
gtgggacaaggttgcagaggtgacactagtggagccgacgtccagatgcccgtccacccgcggccccaggcc

SEQ ID NO: 1299 - DNA, 72 bp, Homo sapiens
aaaccaactgatctgggtttgccactggggcttaccgaagtcaggcccccaacctcccacagagactgggag

SEQ ID NO: 1300 - DNA, 72 bp, Homo sapiens
agttaatcagtttaagatagttcaaaagtgtccttcgagtgcttagtttcttcaagtgctttaaagtgcttt

SEQ ID NO: 1301 - DNA, 72 bp, Homo sapiens
aattgtgtaaagggaagaggggattcactcacacccgtggaggaggcaggatcgcctttcctaaagtgatag

SEQ ID NO: 1302 - DNA, 72 bp, Homo sapiens
agcagttcctctttgccttatatttgtggtacgcccggccagccttcaagatgggtttgtcaattcggccac

SEQ ID NO: 1303 - DNA, 72 bp, Homo sapiens
gctgcccggggctggggtgggctgctctgggagaccgttttaggttgggttctcttcaagcagaggctgaga

SEQ ID NO: 1304 - DNA, 72 bp, Homo sapiens
gctcagaaaggccaggacaggtgggggagacagagcgagcctggagccctttcctgtgtgtgtcagctcagc

SEQ ID NO: 1305 - DNA, 72 bp, Homo sapiens
cactgcactccagcttgggccacagagcgagactccgtctcaaaaaagaaagaaaaaaagaaaaagtcctca

SEQ ID NO: 1306 - DNA, 72 bp, Homo sapiens
aaaaacaaggaaattaacaaggcagaatcgcgatgcgagacttgacaaagttgttaataaggcgaaggccca

SEQ ID NO: 1307 - DNA, 72 bp, Homo sapiens
aactccggtccctctgggatggactgatcgtgcttcgtgttcctaggcaatgctgaaggcatacagtacaaa

SEQ ID NO: 1308 - DNA, 72 bp, Homo sapiens
ctgctgctatccagggaagacacaccctcacgctgcgtgccctctaggtgcactcggcacagccagggttcc

SEQ ID NO: 1309 - DNA, 72 bp, Homo sapiens
agccacctcccacccagaaagatcagtgaggaccacgtgctgtaaacagagtagagggctcagctccctgct

SEQ ID NO: 1310 - DNA, 72 bp, Homo sapiens
ggctctgatgagccctggagctgcaaaatataggccggggtacctcagccggaagggacttcagttagtgac

SEQ ID NO: 1311 - DNA, 72 bp, Homo sapiens
ttggtccagtgtgatggagaagtttgatgcaaatccgtcttaaggaggagaatggaggctgtcatggagtcc

SEQ ID NO: 1312 - DNA, 72 bp, Homo sapiens
taggcccaatgaaacttatgaaccaagattagtcacgcggatagtggagctgcttaacatcaatataacttt

SEQ ID NO: 1313 - DNA, 72 bp, Homo sapiens
ccagccatgcagcctgggggcaggcggggcctgtccggtgatgtctgtcttgcactctggagagcacgggaa

SEQ ID NO: 1314 - DNA, 72 bp, Homo sapiens
attgacaacgttatctcagtggggagctgggaggccggaaggaatgaagtgtctgagaaccgtgcgccaggc

SEQ ID NO: 1315 - DNA, 72 bp, Homo sapiens
attagcggactccttcgcgggagtgcagtcaagcacggctccccagtgcgagcacgactcggctgtccgtaa

SEQ ID NO: 1316 - DNA, 72 bp, Homo sapiens
ccagggtgaggggccacgtgcagctttctgcctcccgctgcctttggaacaggagtttcaccacagcccctg

SEQ ID NO: 1317 - DNA, 72 bp, Homo sapiens
gtggctgggcagcatgcagggcagcgtccagtaggcggcagtggcaggaagggagcgggcggccctcgcagg

SEQ ID NO: 1318 - DNA, 72 bp, Homo sapiens
gattgaattatgtagatgaagtacagtcaactgaacggtgactgaatgattgagcaaccttggatgccaacg

SEQ ID NO: 1319 - DNA, 72 bp, Homo sapiens
agatatgatactgctgttttcagacagctgtgtttcggagtgagactgatttaaccagctggctggcatcat

SEQ ID NO: 1320 - DNA, 72 bp, Homo sapiens
taagcaaagtcttcaattgtgtttctgctaaagtacgtgaagtacatgccactttctcagtaggaaagactg

SEQ ID NO: 1321 - DNA, 72 bp, Homo sapiens
cactcaaagatttgagtcacaggcaatgtggttcacgtactatatgaataagcacaatgaaggtatggagta

SEQ ID NO: 1322 - DNA, 72 bp, Homo sapiens
aggcctaacacactcaacataacagaagactataacgagggttatgggagttacaagccagaaaccacagat

SEQ ID NO: 1323 - DNA, 72 bp, Homo sapiens
ttccccttgcaactatgaagttggttcagggcctccggctgacccttctctcagtatttccctctcagagct

SEQ ID NO: 1324 - DNA, 72 bp, Homo sapiens
ggtgtttaaggcacaatatttcaggcctaaaccaccgaatgacacatgcctaaacccagaatcctgtattct

SEQ ID NO: 1325 - DNA, 72 bp, Homo sapiens
caccctgcccccagcagcagccgtccatcgtcagacgtgatcatttcctgaggcctcgagtgtgtcagggtg

SEQ ID NO: 1326 - DNA, 72 bp, Homo sapiens
aggatgtggaggtgtcttgggctgggctgctttcacgccagcagaactccagggccaactccagggccttct

SEQ ID NO: 1327 - DNA, 72 bp, Homo sapiens
agctgccgtggtgaatataaccgggagggagtgcccgcctctgcccacctgcctggcatctggggttcccgg

SEQ ID NO: 1328 - DNA, 72 bp, Homo sapiens
tgaagaattccccaagaagctgactcacgaaaaaacgcattttctacatccagatgatttcatcccccttac

SEQ ID NO: 1329 - DNA, 72 bp, Homo sapiens
actggttctacttgtgttctgaggtccctgaccaccgccttgggtccagccctcgtccagggggcggcggtg

SEQ ID NO: 1330 - DNA, 72 bp, Homo sapiens
ctacaggtgttatgcacgtggaggaaggcgctcctcgaggagagagctggtcagagacacgtgctaggaaag

SEQ ID NO: 1331 - DNA, 72 bp, Homo sapiens
agctgggcaggatgccaccctttctacaataagttcggtcccagggattcccccaacacacacacacataca

SEQ ID NO: 1332 - DNA, 72 bp, Homo sapiens
tccagggctggcaggctcagaacccctggtgctagcggtaggaatgaaaacaagaagacatgatatttaggt

SEQ ID NO: 1333 - DNA, 72 bp, Homo sapiens
catcttgtgagcctgtcagcactgaccttgtcacgcggctcatgactgctcctcatccgacctcagatgagt

SEQ ID NO: 1334 - DNA, 72 bp, Homo sapiens
ggtgacgggtcagtgcccagagctcacctgcctttcgccaaactctaaacacccctgtgtgtttcccctact

SEQ ID NO: 1335 - DNA, 72 bp, Homo sapiens
aaaatcctgagtgtgggagtcggtttggccagctccgctctcaggatggagggtgcctttgggaaggaaggt

SEQ ID NO: 1336 - DNA, 72 bp, Homo sapiens
tgccagaatagaaaggagaaaagggcagactcagtcggctggccccagtgcttaaggcagtgcaggcccaag

SEQ ID NO: 1337 - DNA, 72 bp, Homo sapiens
cctgttcagcttctgcaactttctagccacctgtgcgcccttgggtgtggctaagctcttagacctcagttt

SEQ ID NO: 1338 - DNA, 72 bp, Homo sapiens
gtttagccttcaggctgttttatttttctcctgcccgtagttttctgtggggcttccccagtcttgccagtt

SEQ ID NO: 1339 - DNA, 72 bp, Homo sapiens
agctgctactgtcagcccagacccagtggacagaacgtcacaccaaaatgcccacacatgtaatttgtcacg

SEQ ID NO: 1340 - DNA, 72 bp, Homo sapiens
ggaaatacaaagtcacagttttctttcatcttttacgagctaatgggaatgtaggcagaggtcaatggtgaa

SEQ ID NO: 1341 - DNA, 72 bp, Homo sapiens
gaacggatgtggcttcttaaccattacgctgtgtccgtcacagtcattctcacttctcgagtacccagttgg

SEQ ID NO: 1342 - DNA, 72 bp, Homo sapiens
cctgcgctgcgagggctgtgggcactgatgggcaacggaccagagcctccagcactttcctgtgccacccca

SEQ ID NO: 1343 - DNA, 72 bp, Homo sapiens
ctctctcctcagctgaactttgacctggaccggggcgtgtttccagtagtcatccaggctgtggtggacgaa

SEQ ID NO: 1344 - DNA, 72 bp, Homo sapiens
gccaggaggaacttgtacttggtctggggcaggaacgccacagagggcttccccaggtccaggccgggccag

SEQ ID NO: 1345 - DNA, 72 bp, Homo sapiens
cctctgcctgagcctggcagacacaacacgaagaccggggatggggcgggggaggcacaggagacggctctc

SEQ ID NO: 1346 - DNA, 72 bp, Homo sapiens
acagctgtcagcacccccctccatcagagagaagacggagccagtgtgctgggcaccctggggtcataaggc

SEQ ID NO: 1347 - DNA, 72 bp, Homo sapiens
gagccctgagagtggaaatcaagagattttttccacggggaagttctttttacaaagcgttgatttctcggc

SEQ ID NO: 1348 - DNA, 72 bp, Homo sapiens
agccaaccatcactttaagatataaacaaaggatgcggaaactataagggatgattgcatcagagagagtct

SEQ ID NO: 1349 - DNA, 72 bp, Homo sapiens
ggaaactgacgcctgtgcagcacgaaccccactcgcgtcctgtctgcctggactgccgccgtggggacttct

SEQ ID NO: 1350 - DNA, 72 bp, Homo sapiens
tgaaagcctcagtagaacaaaaaggcgaacactcccgtgaatgagagacaatcagccctgcctgcctgagtg

SEQ ID NO: 1351 - DNA, 72 bp, Homo sapiens
gctcactgaggcgctgagagtgagatgcgaagggacggccagtgcaacacgggcctgtgtgtttttatggac

SEQ ID NO: 1352 - DNA, 72 bp, Homo sapiens
gtttcttgggctttgcagagtctcggagagggtgccgggggatggggagtgagagacccccagggacttggt

SEQ ID NO: 1353 - DNA, 72 bp, Homo sapiens
ctctgtttaggaacgtggatgtggcaggggctgggcgggcacttggcctttataacaacagaagaggatttt

SEQ ID NO: 1354 - DNA, 72 bp, Homo sapiens
gaagagcggccccagggggaagaacaggatggcagcgtcttcacttggggccgctccagccccgaggcgcac

SEQ ID NO: 1355 - DNA, 72 bp, Homo sapiens
cacgcagctggggagagagcacgctccaacgctgccgtcggtttggtttaacagccacaagccgtcgtttat

SEQ ID NO: 1356 - DNA, 72 bp, Homo sapiens
cagctgggggcagggcccagcctgtcccagggacacgaagaaggtcagcacagttagggttgggctaagcat

SEQ ID NO: 1357 - DNA, 72 bp, Homo sapiens
agctgggagcctggtgtaagctgcagagacggccccgcaacaggcaggggagctcagtgcctttggggagcc

SEQ ID NO: 1358 - DNA, 72 bp, Homo sapiens
agtctcccagagatgaagcagctggcctgagagcacgtggctgagtcctggctgggtatgagcccagactgt

SEQ ID NO: 1359 - DNA, 72 bp, Homo sapiens
tggggctagaggaagcctctgacacaggaagtgggcgcatagcacttgctgtggaaatctgtgcctgccccc

SEQ ID NO: 1360 - DNA, 72 bp, Homo sapiens
atctctcaccatcctgcccacccaggctccctccacggagatctgtgtggttagcacagtggccttgatatc

SEQ ID NO: 1361 - DNA, 72 bp, Homo sapiens
gtaccctgacttccagggtccttgggtgcaacatccggagctagtccagagtaccgccaatggccttgtcac

SEQ ID NO: 1362 - DNA, 72 bp, Homo sapiens
agtttatcttgtacaacaccctgatgttcagattacgaaactatgaagaagaagtggagtgatcctgaaaat

SEQ ID NO: 1363 - DNA, 72 bp, Homo sapiens
atggaaagtcttttcctgtgttgtgatctccacctcgccaactatggccacagtcagttcctttggtagcac

SEQ ID NO: 1364 - DNA, 72 bp, Homo sapiens
cgagatgcctccgagggagcgtggagcgggcctcccggccttggcaggcagctaggatgaagatctttccag

SEQ ID NO: 1365 - DNA, 72 bp, Homo sapiens
tcaccccatagaagcttcgctgcaaccctgcgaggcgggagagaggcgacagcacacacactcccaccccca

SEQ ID NO: 1366 - DNA, 72 bp, Homo sapiens
actgtgtgggtacttgagtccttttaaacgattaacgctgggaagaggcaccatttaattaattaatttgtt

SEQ ID NO: 1367 - DNA, 72 bp, Homo sapiens
gcacagatcttgtttcaatattacaagcccaactccgcaactctgtggattgttaaatttatatgctagttc

SEQ ID NO: 1368 - DNA, 72 bp, Homo sapiens
aacaagcaacgcttactcaagcaccaaaaaaaccccggtaacaaggaggagtttcctttttttttttttttt

SEQ ID NO: 1369 - DNA, 72 bp, Homo sapiens
gaagtccccatgggccgcagcctggacgtctgctccgttctccaccaggagggtcaccagggccatgttgcg

SEQ ID NO: 1370 - DNA, 72 bp, Homo sapiens
cttttatttttgacaatgtgagaaccaggcctggccggctggagtcggagagagggacagactgctctctgg

SEQ ID NO: 1371 - DNA, 72 bp, Homo sapiens
ctggcacctcagagtcgtccttgacttccctaaaccgctttcccccatctcagattctgagaatttggtttc

SEQ ID NO: 1372 - DNA, 72 bp, Homo sapiens
tggcatcttcccgcctgcaatgcctgctctctcagcgtctcggagaaggggggatcacacactcatcgtcat

SEQ ID NO: 1373 - DNA, 72 bp, Homo sapiens
cggcttctccagggaggcggccctgggcgcgggggcgggcgggcaaagctggctcagtccatcgtggtccct

SEQ ID NO: 1374 - DNA, 72 bp, Homo sapiens
gggacatgaggatgccaggtagggaggttggggggcgggtggcaccaccgcagcttttgccccagggctgca

SEQ ID NO: 1375 - DNA, 72 bp, Homo sapiens
aaaatgctgactgaggcctcatggaagttctgtgccgattcttaggtgcctgtgattcatctgtgcctgatg

SEQ ID NO: 1376 - DNA, 72 bp, Homo sapiens
tttaagggaatctcagacccagagaggttgagaaacgaatgaagatcgtacagctaataagtggcagagccg

SEQ ID NO: 1377 - DNA, 72 bp, Homo sapiens
atgattgctgtgttttctttgcagtgctctggcctcggccacttgttgaggctaatttatgctgccagaggg

SEQ ID NO: 1378 - DNA, 72 bp, Homo sapiens
gttgagctgttaagaaggagaaggtggcggccgttcggcccctcacagcactcaagggcggaagggtccagc

SEQ ID NO: 1379 - DNA, 72 bp, Homo sapiens
ggctcaaccagtttcactcacaccccagttcccatcgtgtcttgattccacctttagaggctgcccagggtt

SEQ ID NO: 1380 - DNA, 72 bp, Homo sapiens
ggagggaacgtctcctgcttcctgagggggtgggacgaggctagagggaagcccagaggaagagctcccaac

SEQ ID NO: 1381 - DNA, 72 bp, Homo sapiens
agtcgaaacgtcatcttacggggtgaggccaggggcggggtcggttgattaagatgcgggcaaaggaccctc

SEQ ID NO: 1382 - DNA, 72 bp, Homo sapiens
acaccatcagccctacagagacagggtggagggcacgcagcacctagaacaggagggcatggcctgctcctc

SEQ ID NO: 1383 - DNA, 72 bp, Homo sapiens
agactgggtgagtcaacgaaacaaacaaatgggcccgatgaggtcagctttttggaaaaggaacaaagaaaa

SEQ ID NO: 1384 - DNA, 72 bp, Homo sapiens
atagaatatatttaactgaataactaagacctgaacgtaatccaaggactgcatgttgagaaatcactgccc

SEQ ID NO: 1385 - DNA, 72 bp, Homo sapiens
agtctgccccaggccttcattgtctggaaccaccacgttcccctccaaaaaaaacccttcctctttgagctc

SEQ ID NO: 1386 - DNA, 72 bp, Homo sapiens
gtccagcagccccaggctgagcttgggcacaaagccgggtgcagtggcccacagcggagctggcagggcccc

SEQ ID NO: 1387 - DNA, 72 bp, Homo sapiens
ccagaaggtagcagcccctgtaatagaaaaacaatcgtcttccctaggccgctggcgtcagcaggcctgggc

SEQ ID NO: 1388 - DNA, 72 bp, Homo sapiens
ctgggcagtctgggctggcgccggcgggggcggggcggcggcagcgggcggcggcgggggaagtgggccctc

SEQ ID NO: 1389 - DNA, 72 bp, Homo sapiens
aaaaccagctgggaaggcagccagactcccgccaccgtcctggaaccccctcctctagcagacattcactca

SEQ ID NO: 1390 - DNA, 72 bp, Homo sapiens
aagacccagaagctggagtcccagctcaaccaaatcggagttgtgggcagtcacgggcttccacaagcctcg

SEQ ID NO: 1391 - DNA, 72 bp, Homo sapiens
cgcggcactcctgcacatgtcgcctcgcaccgtggcgggcgtgtcccgtggaaagctgcccatgctgcccac

SEQ ID NO: 1392 - DNA, 72 bp, Homo sapiens
ccagccgaaatcgaggtgagagaaggggcccctcacgctgcctctcatggtgtgggaacccctcggcgagct

SEQ ID NO: 1393 - DNA, 72 bp, Homo sapiens
tgagacagcacaggtcccaaagcccagaggctgggcgtgcattactcagcaaatccttacagagcccccggc

SEQ ID NO: 1394 - DNA, 72 bp, Homo sapiens
ctcctagaactttgaaattttggttattatctgcccgagagcttggaggtagacctccgtagagaaatggca

SEQ ID NO: 1395 - DNA, 72 bp, Homo sapiens
cgagagcaacaggcagggggcgaggcttacattgtcgttctgaaaggagtggaggaagttccctcctagctc

SEQ ID NO: 1396 - DNA, 72 bp, Homo sapiens
aagggggaaagggactcccaggcaggaggggacagcgtgagcaaaaagcatgcagacctggaaaagcctaat

SEQ ID NO: 1397 - DNA, 72 bp, Homo sapiens
agcggtgggccggggcgggacgttccagacctcatcgggggcccgggcgtccccctgctcggcctgtctggg

SEQ ID NO: 1398 - DNA, 72 bp, Homo sapiens
tgcagcaaaggctgcggtggttgagacaagcgggccgtggcctggggggaacagtgaggggaagcaggacag

SEQ ID NO: 1399 - DNA, 72 bp, Homo sapiens
tgccccgccgtgcacagacctcagcccccgggagacgtgcctgccccgccgtgcacacacctcagcccccgg

SEQ ID NO: 1400 - DNA, 72 bp, Homo sapiens
gctttctccagactgccagagggattcatgacccccgatctagtggaaccaaactggagaaggcattgaaaa

SEQ ID NO: 1401 - DNA, 72 bp, Homo sapiens
gtcttgaggatgggggcttgagtgatggtgggtgtcgtgtttttctgtagaaactgagtatcgcagactgtc

SEQ ID NO: 1402 - DNA, 72 bp, Homo sapiens
gtgccgagccccaccgggccacccctgcagagctgcggtcacatgctctgccaggtgccaggaagccacaca

SEQ ID NO: 1403 - DNA, 72 bp, Homo sapiens
caccagcaacaacattgaaatcctattaaattgcgcgtgggagtttaaatgggtaaaatcactcttagaaga

SEQ ID NO: 1404 - DNA, 72 bp, Homo sapiens
aatcaaatgcacaaaaacaatgggaaaggggattacgtcaaatgtacgaaagaaatggcaggaatccagtgg

SEQ ID NO: 1405 - DNA, 72 bp, Homo sapiens
acctggtctcgaaaagaggccctggcaacctactgcgcaccagaggggaacccgcccgccgtcccaggccgg

SEQ ID NO: 1406 - DNA, 72 bp, Homo sapiens
tcagattgcgtaggcactctcctgagtaggtgaagcgtgcggctggagaaagaaaaggaagaacaaggctct

SEQ ID NO: 1407 - DNA, 72 bp, Homo sapiens
gcccccaaactgtgccacctccaggggctgcgcgtcgactttggctgggtttggaagtacagcccacactca

SEQ ID NO: 1408 - DNA, 72 bp, Homo sapiens
ggaatgtggggagatgtgtgcctgcacagtatcaacgttatcagctgccctgttcatgtcgcctctccctga

SEQ ID NO: 1409 - DNA, 72 bp, Homo sapiens
caagtcatttcatggaaaagctgttttcttacctgcgtctaggccttcatctgtgagagtcatgcttcactc

SEQ ID NO: 1410 - DNA, 72 bp, Homo sapiens
ctggaatgtactggctggggtaggcctcagtgagtcggccggtcagggcccgcagcctcgccccatccactc

SEQ ID NO: 1411 - DNA, 72 bp, Homo sapiens
tctggatctgttggatgcagggcaggacaaagacacgccctccagccaccatgactggggggcttcggcaga

SEQ ID NO: 1412 - DNA, 72 bp, Homo sapiens
gattccagaagctgcaagaacctgtgcaacttgaccgtgtggctctcctcccgcttcccttctgcccccctc

SEQ ID NO: 1413 - DNA, 72 bp, Homo sapiens
tatctcaggaagaacctgtgtttggccctgagcaccgcaaaagggtagaaattctgagatattgtagctata

SEQ ID NO: 1414 - DNA, 72 bp, Homo sapiens
gagtgtgcattgatccggaagggtgcccaagtgtgcgtcagtgctagggcctgcttgacagaactgctgggc

SEQ ID NO: 1415 - DNA, 72 bp, Homo sapiens
actatctcagagggaaattttccttcaggtcattacgtgagtctctttaaagcatggcggactgtagcatta

SEQ ID NO: 1416 - DNA, 72 bp, Homo sapiens
ggccacccgccgtgaagggaagtcagtgcccagtccgagcaggaggaggcagagtcaacaggaagttgagaa

SEQ ID NO: 1417 - DNA, 72 bp, Homo sapiens
ccaaagagctccgtgcagggagcagggtgggtgagcgagaggtctcgccttcctgcagcccctcccttgttt

SEQ ID NO: 1418 - DNA, 72 bp, Homo sapiens
accttaactgggcagcccttggggcaggcgctggccggtgcctcagcccaggcctctgtgctctgcatgcac

SEQ ID NO: 1419 - DNA, 72 bp, Homo sapiens
cactctactctttgcctacaagtaccagctgtcaacgtggtattgagctgggttgttttcctatattgcaac

SEQ ID NO: 1420 - DNA, 72 bp, Homo sapiens
tttagttttcctgctctttgcgcaggcatagtcatcgggatgttctttaagtttccatttgacagtggattg

SEQ ID NO: 1421 - DNA, 72 bp, Homo sapiens
tcctctgtggttccacccagccttccaaccaataacgcagcgtctcctgcaggaaactcatcgcttgggtca

SEQ ID NO: 1422 - DNA, 72 bp, Homo sapiens
ccccggtgccaggaagatgagcgtccccttgtctccgtcttagtctcagtggctcttgcatttcatgcttta

SEQ ID NO: 1423 - DNA, 72 bp, Homo sapiens
cattacccaggagggctatagcagggtcagaaagacgttagggaaaagaggctgacgcaagacggaagtggg

SEQ ID NO: 1424 - DNA, 72 bp, Homo sapiens
cggttactcatcggaggacatcgtctactactggtcggagagccaggagcacatccacgggctggacaagct

SEQ ID NO: 1425 - DNA, 72 bp, Homo sapiens
tttgacctgctctcactggtaaggtgacttggtggcgttcccacttgatttagccattttcttccattgtga

SEQ ID NO: 1426 - DNA, 72 bp, Homo sapiens
aggccatcggcggctgaggctgggtccaaggggcccgtgggcgcggacaccacccgccggcggtccgggctg

SEQ ID NO: 1427 - DNA, 72 bp, Homo sapiens
agctaggctctggggttggggcgggctgggattcccgctcactgagattcccgctcactgggattcccgctc

SEQ ID NO: 1428 - DNA, 72 bp, Homo sapiens
cttcaagcttaattaacatggatactgcttactaccgcccactcctcccaaccctccaaaaaaaaaccccca

SEQ ID NO: 1429 - DNA, 72 bp, Homo sapiens
cttcagtttctttgcagcgattttggccgccctggcgggagggggctgttccatcatgtgggagaggaaggg

SEQ ID NO: 1430 - DNA, 72 bp, Homo sapiens
ggtcttccggctcctctgagggctgccacgttgggcgaggggagccatgccaagggtccaggctgctttagg

SEQ ID NO: 1431 - DNA, 72 bp, Homo sapiens
tgcactgcagcctgggcgacagagcaagattctgtcgaaaaataaaaaagaaaagaggcagaggctgggaac

SEQ ID NO: 1432 - DNA, 72 bp, Homo sapiens
gtatttattgtgtaaacatgcaacataaaatttaccgttttgactgtttttaagcgtatggttctgtggcat

SEQ ID NO: 1433 - DNA, 72 bp, Homo sapiens
cgcacattttgaccttcctctctcacaccagtgaacgggcagttgcaacacaatgtgttagggtgcccttgg

SEQ ID NO: 1434 - DNA, 72 bp, Homo sapiens
acctgtccatggtcctgaccacatcatttgccactcgcctccttcatggacaccgtttgctccaagtaccgg

SEQ ID NO: 1435 - DNA, 72 bp, Homo sapiens
cgacccggccagcgtgggcccctgtgaggtgcacccgggccagccaggccatggcatctgcctgctgggggc

SEQ ID NO: 1436 - DNA, 72 bp, Homo sapiens
tccagggagaccctcctgggatgggcctgagaggccggggctcagggaaggggctgggatcggaacttcctg

SEQ ID NO: 1437 - DNA, 72 bp, Homo sapiens
actcagggatcaggcaagtacaaggggtcccatgccgccgagcctctcaggaggcagagagtaagagggtcc

SEQ ID NO: 1438 - DNA, 72 bp, Homo sapiens
aaagcaatttctcatgcccctgggagagaggtaggcgtggctttatggatgtgataggcagaggacttaata

SEQ ID NO: 1439 - DNA, 72 bp, Homo sapiens
aggccgagcctcctgagcagtttcccactctcgcccgagcagctttcggctgcagggggtgctcctgggtac

SEQ ID NO: 1440 - DNA, 72 bp, Homo sapiens
tctccaaccctgacttggtggcttccacggtgactcgtcctggtttccctttccagtgtcatttccctttga

SEQ ID NO: 1441 - DNA, 72 bp, Homo sapiens
tgggctctgcccactggagagttcaggacaggacccgggtgcagaccggaggcccaggcgcagagttgttat

SEQ ID NO: 1442 - DNA, 72 bp, Homo sapiens
agttgttcagggttcactcgtccacggtgagtcgccggagggtcagggaggactcacagagaacagggtgag

SEQ ID NO: 1443 - DNA, 72 bp, Homo sapiens
ggggccaccaaccccatctacaggagccctggggtcgcaaccgtaatggctggcctgtgagccttatgcccc

SEQ ID NO: 1444 - DNA, 72 bp, Homo sapiens
tgttcccactgagtggggctgtccctgggcctgggcggggacgccaccaactgccaaggcctgtgtataagg

SEQ ID NO: 1445 - DNA, 72 bp, Homo sapiens
ggcctcggggtggaggactagctgaccaactgctccgtcactttgggccagaggcagcccgggtgactttgg

SEQ ID NO: 1446 - DNA, 72 bp, Homo sapiens
cctgacttctcctttggtaaaggcccccttaccaacgctgcctctctggtaagggggtcctttaccaaaaga

SEQ ID NO: 1447 - DNA, 72 bp, Homo sapiens
cccagtcagcaaatacctgtgccagattcaggggtcgaaggtgccccaggcaaaagagggctgatggcaggc

SEQ ID NO: 1448 - DNA, 72 bp, Homo sapiens
gaggaggctggctccagagttcacactggtgaccacgacaggcgatgtcgaaacccagcggagcagttactc

SEQ ID NO: 1449 - DNA, 72 bp, Homo sapiens
caaatgtgaccaactttgctttgggaactttcccccgtcttctccccactcctccggagaacccgaggacag

SEQ ID NO: 1450 - DNA, 72 bp, Homo sapiens
aggtttgaggaagcgcatcctgaagctgatggcaccgtgtgggggcagcgggcgggcaggtgcagacgtttc

SEQ ID NO: 1451 - DNA, 72 bp, Homo sapiens
tggagagccctcaggaaggcgggtgggtgggctgtcggttcttggaaaggttcattaatgaaaacccccaag

SEQ ID NO: 1452 - DNA, 72 bp, Homo sapiens
ccttgccctgctcacagctggaagaggtagccctacgtccttcaggctgacaaagtcctttcctcatttctt

SEQ ID NO: 1453 - DNA, 72 bp, Homo sapiens
gatgtaaaacaaaacaaaaaaagttcgtttgtaaccggctgcatcttcccaaatggatggccaaatgggaca

SEQ ID NO: 1454 - DNA, 72 bp, Homo sapiens
gggacaggtccccagagagaggtgagacggtgcaacgcgagggtgagttcggagtcatcctccagatgtcca

SEQ ID NO: 1455 - DNA, 72 bp, Homo sapiens
attcattcaaaactatgttttcatcatcagatgttcgttttatgtttggatgaactgacatacttgttccac

SEQ ID NO: 1456 - DNA, 72 bp, Homo sapiens
tgtgaatttcacaattcacagatgttagccgctctcgggctaagtaaaggaagagaatgtcaagttttaaat

SEQ ID NO: 1457 - DNA, 72 bp, Homo sapiens
ggtgttacacactatggctcctcctgtttacctgccgcctgcaggcctgagctcatgaatagccaagcaaaa

SEQ ID NO: 1458 - DNA, 72 bp, Homo sapiens
ggtgcagccattgttctggctggtctctcttcatccggcctcgtctgttactctgctctttctagctcattg

SEQ ID NO: 1459 - DNA, 72 bp, Homo sapiens
cagacagggcaacctgccacagagcataatgttagcgtgtgcctctctggggagggaaccccaggggacagg

SEQ ID NO: 1460 - DNA, 72 bp, Homo sapiens
gttcattccccaagaggcctctccaggggcggaggcgggtgctggggctggcctgtctgcagctccctggcc

SEQ ID NO: 1461 - DNA, 72 bp, Homo sapiens
cggctgtggaggcggctctttgttaatatttaacacgagctgggcagttgccgggaaaacagctgtttacag

SEQ ID NO: 1462 - DNA, 72 bp, Homo sapiens
tgtggcggagggggccccccactccgcgggtgggtcgcgggggggacttgagcacccactcggagttgcccc

SEQ ID NO: 1463 - DNA, 72 bp, Homo sapiens
cttcacggacaagaggctacggaaacaaagcctaacgaaaaatgacaaactagatttacattttattctcga

SEQ ID NO: 1464 - DNA, 72 bp, Homo sapiens
attttcaacaacagtcactttcttctgacagtcaacggagaaaagctccactgcctctcctggctgccagga

SEQ ID NO: 1465 - DNA, 72 bp, Homo sapiens
agcctctgctgctggcgtgaggcccagcacacagccgctctgctgccagcccacagaacacctgggcacaca

SEQ ID NO: 1466 - DNA, 72 bp, Homo sapiens
tgaacaaagacacagctacccatgtgcttccttcccgtgcagaccatttgtctctaaaatgaaatgaaaagc

SEQ ID NO: 1467 - DNA, 72 bp, Homo sapiens
tgtatctcaatcactagtgtcttcagggaagatgacgtaatgagaaagagactgttcttgctcctcttgggc

SEQ ID NO: 1468 - DNA, 72 bp, Homo sapiens
aaaagttagtgttaaaggaagtgagtcagggagggcggagtttgttgtaaggcaatcacctgtcaaaacaga

SEQ ID NO: 1469 - DNA, 72 bp, Homo sapiens
tgcattgtaccggatgagtcatccgagggttagtccgcattttataggcctgttgtgtcattactcacattc

SEQ ID NO: 1470 - DNA, 72 bp, Homo sapiens
ttgggccaccgagttgtgttaatatgatctggtggcgggcagaggaacaacacactatggtggaggaaattg

SEQ ID NO: 1471 - DNA, 72 bp, Homo sapiens
ggctgctgaaatcagggttggagggctggcatgttcgtatttgggggaaggaggcaggatcccaggggaccc

SEQ ID NO: 1472 - DNA, 72 bp, Homo sapiens
ttcctctacaactccagttataaatgtaacaattacgtaaaagtgatctgtttaatgcctggctcctctgct

SEQ ID NO: 1473 - DNA, 72 bp, Homo sapiens
aggacaggcgctgctggagccaagagactcacagtcggtcacctgatttgcatttatattgagaaatcacag

SEQ ID NO: 1474 - DNA, 72 bp, Homo sapiens
aggatctcaggcaggagtgcagtgggagcctcatccgcttcctcagttgggctttgccgccgcaggttagca

SEQ ID NO: 1475 - DNA, 72 bp, Homo sapiens
ttcatcaatctaaaatgagtcatcattgtttcacccgtctaaagggcaaggcaaaaacagtgaaattaagaa

SEQ ID NO: 1476 - DNA, 72 bp, Homo sapiens
ttggtctgtcatttgagcgtgtgtgtttgtgttcacgtgtgcattttacttcctggtgatttacgagaactc

SEQ ID NO: 1477 - DNA, 72 bp, Homo sapiens
ggtgaggctctcctgccccatctccttgggctgcccgtgcttcgtgctttggactaccgcccagcagtgtcc

SEQ ID NO: 1478 - DNA, 72 bp, Homo sapiens
cccaggggaggcctgctccagccccaggggagctgcggccctggctcctgttcccagtcggagtgaccagcc

SEQ ID NO: 1479 - DNA, 72 bp, Homo sapiens
gcttctaaggcgaaaagaagcgccagcctcgtaagcggcctctatctgggctgcccaggccggatgctcagg

SEQ ID NO: 1480 - DNA, 72 bp, Homo sapiens
tcttaacctgccctgggccaagggcctcggccccgcgaaactgcgagtcctccagaaagacacatcgctgtt

SEQ ID NO: 1481 - DNA, 72 bp, Homo sapiens
gacggggtgacctttcccacaggggcagcctgtggcgatgtggcagctgggcctcaccccggcagggctgtg

SEQ ID NO: 1482 - DNA, 72 bp, Homo sapiens
ccaccgtgcttggtctccatcgtggccagttcctacgtgaccgcttttctttgtcaaaaaatagccacaaat

SEQ ID NO: 1483 - DNA, 72 bp, Homo sapiens
agtaattaagtggcagcctcagcaggaagcaagcacgtcatcgagtgagtcaggatgagaagccacctggca

SEQ ID NO: 1484 - DNA, 72 bp, Homo sapiens
aaatgacaccgggctccacttcacacccatcagatcggcccaaatcagaacattggctaatcacgagtgtgg

SEQ ID NO: 1485 - DNA, 72 bp, Homo sapiens
ccggcaaggccaagtaggccttgcaatctaggtggcgctatttctctactttttaggtcaagttcctgcagg

SEQ ID NO: 1486 - DNA, 72 bp, Homo sapiens
ctggcctgtggtcacttcccttcctcggggcatcccggcactggcaggaaagctgtgcacatgcttgtgtga

SEQ ID NO: 1487 - DNA, 72 bp, Homo sapiens
aatggggagtctgttggggaggccctggcgggagccggggctacatccaggtcctcggcttggtggccttgt

SEQ ID NO: 1488 - DNA, 72 bp, Homo sapiens
gctggaggaactcgtggaacagcctgagaggtgtccggcgaggtagggcatgggtggccttgagccctgagg

SEQ ID NO: 1489 - DNA, 72 bp, Homo sapiens
ataagtaagtgggggttcctgggggaccctatacccgggagggagggtaactgcgaattcaaggaagactta

SEQ ID NO: 1490 - DNA, 72 bp, Homo sapiens
tgacacaacggggctagtccctgccatgtgggggacgggggatgccaggtcgccctgcaccagttcccaact

SEQ ID NO: 1491 - DNA, 72 bp, Homo sapiens
cgctcgctgggcggctatgtgctgtcgctcgtgcacgatgtgcgcttccaccactttcccatcgagcgccag

SEQ ID NO: 1492 - DNA, 72 bp, Homo sapiens
gatttttcccagccacagaagtcttctggtgaagacggtctttagactggcagggtttcaaagtaaatataa

SEQ ID NO: 1493 - DNA, 72 bp, Homo sapiens
agcccacggcacaccagcctgcacgatacggcccacggcacagcatcctgcacgacgcagcccacggcacag

SEQ ID NO: 1494 - DNA, 72 bp, Homo sapiens
aaaatgaaagaaacttgaattattgcatgtcacatcgttcaaatttcacaaacttggattcctgaggtcttg

SEQ ID NO: 1495 - DNA, 72 bp, Homo sapiens
tcagaacctgggatttgactcccagcttaggtgagcgaagctgtttgattccagtggcagttacatagaaag

SEQ ID NO: 1496 - DNA, 72 bp, Homo sapiens
cccacctcggcctcccagagtgctggaattacaggcgtgagtcaccatgcctggccaaaagccacaaaggtt

SEQ ID NO: 1497 - DNA, 72 bp, Homo sapiens
gctctgcactggccaggtggaagaaggaggaaccacgtaagattcaggcgagggcgtacaatcatccccagc

SEQ ID NO: 1498 - DNA, 72 bp, Homo sapiens
aggggaaaagaagtagtccgtaccgggaaaggctccgccccctcctggatcacaaacccttcgataacatgc

SEQ ID NO: 1499 - DNA, 72 bp, Homo sapiens
ccaaccagtcccaagtgctcaggacagaggctggacgggctccttcctgcacccctgctcttgggacacagt

SEQ ID NO: 1500 - DNA, 72 bp, Homo sapiens
gagacccagggtgctggcccggttctgccgccggccggctgtggaacaggcttctggagcccgagggtgacg

SEQ ID NO: 1501 - DNA, 72 bp, Homo sapiens
caccttacttagccacttctctaataattctagtacgttttgaagggaaaggaaagctaggacctgcccttt

SEQ ID NO: 1502 - DNA, 72 bp, Homo sapiens
tgtttatttatttatcccgagacagagtctcaccccgtcacccaggccggagtgcaatggtgcaatcttatc

SEQ ID NO: 1503 - DNA, 72 bp, Homo sapiens
cctcgccggagcgggttctccccaacctctccaagcgtctggctacaggccagatgagggaaatagaaaagt

SEQ ID NO: 1504 - DNA, 72 bp, Homo sapiens
gtgtggtgacgtcctggggcccccatgagtcagctcgtcctcgtgcccgggcactggcctctccttcctgtg

SEQ ID NO: 1505 - DNA, 72 bp, Homo sapiens
ttactagtggatttgagcatcgttgagtggttttccgctggatttttaaaagtgaagtagaagacagtggac

SEQ ID NO: 1506 - DNA, 72 bp, Homo sapiens
gcactttttcctcttacagtaagcctaggacaatgcgtagcaaagcttgtggttgtcaccactgatattttt

SEQ ID NO: 1507 - DNA, 72 bp, Homo sapiens
aaaagggtaccacgcgtactttttttcccagcacgcgtggggccttggaaagaacctttactgaggcctgtg

SEQ ID NO: 1508 - DNA, 72 bp, Homo sapiens
ccctggttcttcaagggcagcaagcaggactattccggtagcaaccagagctggagctcagggccccgcact

SEQ ID NO: 1509 - DNA, 72 bp, Homo sapiens
ttcttccctacttctgactgactcagaagtacttccgtcacaactgccacacatttttgaaaaagaaggagt

SEQ ID NO: 1510 - DNA, 72 bp, Homo sapiens
gaagtcagctactgtaaggcaggggaacagacaggcgggtagccctgcgcacatgcacaaccagtgacctgg

SEQ ID NO: 1511 - DNA, 72 bp, Homo sapiens
gcatttttggggattaaggtgataccctaaaaccccggagggcgcacgtaggatcaggtgcacccttcctgc

SEQ ID NO: 1512 - DNA, 72 bp, Homo sapiens
gccctactgtgttcattctccctccaaatggcactcgcagggcacaaggcaaaggaacttcctctgaaaagc

SEQ ID NO: 1513 - DNA, 72 bp, Homo sapiens
ggacacacagtgcctggcatggttcctggccatagcgggccctcacatcctagcttttaaaggagtatatgg

SEQ ID NO: 1514 - DNA, 72 bp, Homo sapiens
ctccagagctctttgatcttgcaaaactgagacagcgtacctattacacatcaaactcctcgttcccagttc

SEQ ID NO: 1515 - DNA, 72 bp, Homo sapiens
caccccctgaaccctaaagtgcagcctagtggctccgaggtcaatctgtgaggtcaaggccccagaaagcta

SEQ ID NO: 1516 - DNA, 72 bp, Homo sapiens
cttcctgcacacctgggggaaaggggtgcggggggcgggcagcttaagtccacataggtactagtaaaggca

SEQ ID NO: 1517 - DNA, 72 bp, Homo sapiens
gggcggtggggtcagcgctgagcgggtcaagagcccgcgccgggggccatccccctgcgctttctatcgagt

SEQ ID NO: 1518 - DNA, 72 bp, Homo sapiens
tggccttattgagccagcactgcggccagcaaccgcgctgggtgtgtctgtgaatttcaagggagcccacac

SEQ ID NO: 1519 - DNA, 72 bp, Homo sapiens
tgtttaactgtacactgtgatgaataattttcttccgtagtagttctgtgaagggctgactcactgtggttt

SEQ ID NO: 1520 - DNA, 72 bp, Homo sapiens
ccagtcactccatgacttaaatatttatagaacttcgtgttctaagtcaacagtcacctgatcattccactt

SEQ ID NO: 1521 - DNA, 72 bp, Homo sapiens
ttcgtgttgcctgtgacacacaggcagggcaaagccgcctcccagcgtctcagttgaacccttaccctcaac

SEQ ID NO: 1522 - DNA, 72 bp, Homo sapiens
tgggctacttccttgtgtctaggtcttgcccaagtcgaccagaggaaatgctccagaagctgatccctagac

SEQ ID NO: 1523 - DNA, 72 bp, Homo sapiens
gaaacacaatgtctctctgtcatcaatgatgcaaccgtgagtaagaggcactgaatcctgtttccgacataa

SEQ ID NO: 1524 - DNA, 72 bp, Homo sapiens
cgagagttaaggacagtggctacgtctacctcagccggatggttcttagaaatggagactctgaggcctaac

SEQ ID NO: 1525 - DNA, 72 bp, Homo sapiens
ggcacgggtgggatagtagcctgggccacccagaacgctggcctcacccttacccaagtttcagtataccca

SEQ ID NO: 1526 - DNA, 72 bp, Homo sapiens
cggctgctcctgccaccatggcgtccctctgtctccgtaccatgtacatcacctgccaccagctggaaagca

SEQ ID NO: 1527 - DNA, 72 bp, Homo sapiens
ctcatcctgcaaggttgctcgctacaaaaattatacggggaaatgagctgggttaagaggagtcaaggattg

SEQ ID NO: 1528 - DNA, 72 bp, Homo sapiens
gagcagctcagtggtgccggctacagagtatcagccgctcttgaagaagccgacaagatgtttctgagaaca

SEQ ID NO: 1529 - DNA, 72 bp, Homo sapiens
actttaggaacattactgcttttttacagtcatttcgcagatagaagacattcaagtacttcctcattttgt

SEQ ID NO: 1530 - DNA, 72 bp, Homo sapiens
taagggcagccgccgccttagccacagacctgccccgccatgacccggctgacagtcctggccctgctggct

SEQ ID NO: 1531 - DNA, 72 bp, Homo sapiens
ctgatcctaggagagacctctccagttcccccaagcgagaaacagattttcccaaggggagtgcctggaaga

SEQ ID NO: 1532 - DNA, 72 bp, Homo sapiens
cagagcacatgcactgtttgctcaatctgaaaacacgtaattatttaacttgccttctaaagtaacaccaca

SEQ ID NO: 1533 - DNA, 72 bp, Homo sapiens
gggatgggcaaggagcatgtgaggcaagtgaggggcgcagggttatgtgtcctctaagaaacaggaaatgca

SEQ ID NO: 1534 - DNA, 72 bp, Homo sapiens
gcagcaagaggctccctggcacctcctcctgctctcgttcccagctggtaaacagcagagcaggagtcagcc

SEQ ID NO: 1535 - DNA, 72 bp, Homo sapiens
tatttggggctttgcctcataccctccaccccaggcgctctgccgatactttgcaaacatttattgcagttc

SEQ ID NO: 1536 - DNA, 72 bp, Homo sapiens
ggccaggcaggtgggcctcaggaggtgcctccaggcggccagtgggcctgaggccccagcaagggctagggt

SEQ ID NO: 1537 - DNA, 72 bp, Homo sapiens
ggtgggctgagacacctcggcctccactgacgcggcgttctcttcccgcagcgcctaggactgagggcaccg

SEQ ID NO: 1538 - DNA, 72 bp, Homo sapiens
ttgcctacgttgaactgcctgggtgagaagtgtggcgtggccatttcccgtcagatgtctgctatctactca

SEQ ID NO: 1539 - DNA, 72 bp, Homo sapiens
aaggcagctgctgtgagccctctaagtgtcccccacgactccaccaatagcctagttctcctctaagatccc

SEQ ID NO: 1540 - DNA, 72 bp, Homo sapiens
acagcagaaggtgagtggcaggggagccagcatttcggcctgagctctgccccctgtcagatgagcaggggc

SEQ ID NO: 1541 - DNA, 72 bp, Homo sapiens
aagacactgagttcctcactcgcctcctatcatgccgatgatcacaggagaaagagcagggcacatgcatgc

SEQ ID NO: 1542 - DNA, 72 bp, Homo sapiens
tctcggctgcccttcctgaggccccaaatgaatggcgtgtgcatcttcgtcgaagatattaatacgccaccc

SEQ ID NO: 1543 - DNA, 72 bp, Homo sapiens
tctttcccatctccttattccgggtgcagaacgagcgaggaagcaaagcggaaaggtcaagagaacaaattc

SEQ ID NO: 1544 - DNA, 72 bp, Homo sapiens
gttcttagagattggtcatagttgtccacctgcctcggaaactgcaggtacaaatgcagcagcaaagtattt

SEQ ID NO: 1545 - DNA, 72 bp, Homo sapiens
gaggcagaaaaaagattgtaccatatcatggcaatcgtggacagtttggcagctgagggaaagatgactcat

SEQ ID NO: 1546 - DNA, 72 bp, Homo sapiens
ctgctcaccttcgcagtaggggaagttgtaggcaccgggcacacatgtgtcacaccgcagccccgtcacacg

SEQ ID NO: 1547 - DNA, 72 bp, Homo sapiens
ctcccacccgcacagagccatcacatggaccacatcgtggcgtgtgtgtaaagggcctgcagcattggcaca

SEQ ID NO: 1548 - DNA, 72 bp, Homo sapiens
gcacggcacttggcagctgtcttagtctgtccaggcggctatagcagaatgccatagactgggtgacttata

SEQ ID NO: 1549 - DNA, 72 bp, Homo sapiens
cgaatggtgtggacggcgcataaacgtggatgtagcgaatgataaggcagtgaatgaatgtcagtggtgggc

SEQ ID NO: 1550 - DNA, 72 bp, Homo sapiens
cttacaatattgccaactgcagaaacttcctactacgttaatcacaaaaacaataatttcacaatcacgttg

SEQ ID NO: 1551 - DNA, 72 bp, Homo sapiens
ccggctcaaaggactaaccgttttccccaaacacgcggccctgagcctccggtgctttgcgaaagccgtccc

SEQ ID NO: 1552 - DNA, 72 bp, Homo sapiens
cacaaaagccaccaggaagaggaagacacccactgcgatgatgaccactggcaacagagagccaggggtagc

SEQ ID NO: 1553 - DNA, 72 bp, Homo sapiens
aatattcaggataatacaactgtaattttaagtagcgtgtggcactttcccaagcactgagtcattctagtg

SEQ ID NO: 1554 - DNA, 72 bp, Homo sapiens
ggccatggtacctgcacacctaaaacactaggccacgcatctgatctgtagtcacatgactaagccaagagg

SEQ ID NO: 1555 - DNA, 72 bp, Homo sapiens
cactgaccctctgattgcacggtgctgcacacttacgcgagccgtctcatttcgccatcagaaccgcagccc

SEQ ID NO: 1556 - DNA, 72 bp, Homo sapiens
acaccagtgacttcccactcaccaaagtctggggccgtttcctcaagatcctgcccactccctgacccttcc

SEQ ID NO: 1557 - DNA, 72 bp, Homo sapiens
gtgttaccagatctcctgcaggggagaaacggtcacgaaacatgaactggtctgccctgctcttggagagtt

SEQ ID NO: 1558 - DNA, 72 bp, Homo sapiens
ggctagctccagaaggaggaagtagagggttctctcgatcagggcctcagcttgtgaggacttggagcatac

SEQ ID NO: 1559 - DNA, 72 bp, Homo sapiens
gccagtgctcccgtgaccatctgcaactagcgctgcgggagtagccccgtccctacccctcaggcttggcca

SEQ ID NO: 1560 - DNA, 72 bp, Homo sapiens
ctgaaacaaatgctatttctggctgctgccattcccgcagagcacttgtgcaagttcataagacttcctaag

SEQ ID NO: 1561 - DNA, 72 bp, Homo sapiens
agctaataggaggcaatttcaacttcactccctcacgctaccccttccccctccagactggccgtttcaagg

SEQ ID NO: 1562 - DNA, 72 bp, Homo sapiens
cacccatttcccacggctgctgcaacaatgtgccacgaactgggtggctttgaacaactgacatttattgtc

SEQ ID NO: 1563 - DNA, 72 bp, Homo sapiens
caggcttatggcacacgggcctctctaggtgcccacggtgtgtgccaggcagccctgtcgccatcgagctta

SEQ ID NO: 1564 - DNA, 72 bp, Homo sapiens
gaatcagttgcctgggcttcgagacagttttctgccgtattttgggtaattgtagttgccaggagtctgact

SEQ ID NO: 1565 - DNA, 72 bp, Homo sapiens
gcgtggggcagaggcgctgggccctggcgctttaacgctggtgtttctggttttaaatttcacgacccagtg

SEQ ID NO: 1566 - DNA, 72 bp, Homo sapiens
tacacataggtttaaaaaaaaaaaaaaagaatggacgcagcacatacagtgaaggtgaaagctcctagtcgt

SEQ ID NO: 1567 - DNA, 72 bp, Homo sapiens
aggtctgaggctgttcattgcctgggtttgtccagcgggcctgaagccatggagagcataatatttagaggt

SEQ ID NO: 1568 - DNA, 72 bp, Homo sapiens
tgcttcaggcctgatggcagcagctagtaaggctgcgggtggaggatgtcagggggccccaaagatgtggag

SEQ ID NO: 1569 - DNA, 72 bp, Homo sapiens
aatgcagaccatctacctacctggctacctcaaatcgaagataattttctttcgttttatacctccctctac

SEQ ID NO: 1570 - DNA, 72 bp, Homo sapiens
gtctgctccatccctgatgacatttcccaagtgcccgtggagctggggtttactagtcatcaggacttctct

SEQ ID NO: 1571 - DNA, 72 bp, Homo sapiens
aaaggatccctctctggaacagactgtgcagatcacggtatggtcagcgccaggtcctcagggacaggactg

SEQ ID NO: 1572 - DNA, 72 bp, Homo sapiens
gtctggtggctcctgcagccgcgacacgggctgagcgcaagtgatgtgtgaggtgtccccaacagatggcac

SEQ ID NO: 1573 - DNA, 72 bp, Homo sapiens
ctggagtcctgggagctggggtagtacttcttgtccgcgattctcacgcttaagacctggttttctcttctg

SEQ ID NO: 1574 - DNA, 72 bp, Homo sapiens
gtgtgagggtcccgcattctcgatgtcgttgatgtcggcatttcctgttaaatcagcaagatctttcctcct

SEQ ID NO: 1575 - DNA, 72 bp, Homo sapiens
gcatgtgtggctgggatggccaggatgtctgcatgcgaccgggacaggccacctcccttggcatcaggccca

SEQ ID NO: 1576 - DNA, 72 bp, Homo sapiens
tcaaggattagcaaaaaagataggcaacacccctgcgtggtactgctaccaccctgcaacacccgcccagtc

SEQ ID NO: 1577 - DNA, 72 bp, Homo sapiens
atagagctaactcgtgcagctggttttgggctcagcgaggggcggtgagcgggacccgcctggctggcactt

SEQ ID NO: 1578 - DNA, 72 bp, Homo sapiens
tttccctcctgcttctctagtttcaaaaccacacacgttttgtcagaaagttgccaatattcttgtgaaaca

SEQ ID NO: 1579 - DNA, 72 bp, Homo sapiens
ggagctgggcacagctggcagcccaggtggggccccgcctgaggccgccccgggggattgcacaagggcccc

SEQ ID NO: 1580 - DNA, 72 bp, Homo sapiens
gaacaggacagggcacacagatagaaggtagacagcgagcaattttcccctcttccttcttgactcagctca

SEQ ID NO: 1581 - DNA, 72 bp, Homo sapiens
gggtcagaagcagaggcctgctctacagcccttttcgtaatcaccagtcctccccttggcctacttcaaaca

SEQ ID NO: 1582 - DNA, 72 bp, Homo sapiens
cgcctccagccctccccttgccgcctgcccaggcccgtctgctcacccctggatatacttctttgtcaagag

SEQ ID NO: 1583 - DNA, 72 bp, Homo sapiens
cctaccaaatggggggccgtgccatctctgcctctcggtgaggagatattacgacacagccagtgagattca

SEQ ID NO: 1584 - DNA, 72 bp, Homo sapiens
aggcccattcagcctttaaaaagaaggcaatcttgcgacatactataacatgaacaagccttgaggacatca

SEQ ID NO: 1585 - DNA, 72 bp, Homo sapiens
gcaccagaggaatccacactaacaagctttgctaacgggcctttatcaccacttacttgccttcccacaagt

SEQ ID NO: 1586 - DNA, 72 bp, Homo sapiens
ggacagatgtgttctatacacttgtttaaacacggcgctcattaggaggtaatgcatgtatggcaagttgat

SEQ ID NO: 1587 - DNA, 72 bp, Homo sapiens
cagtacatgtcttcacccggattgactaacatgttcgttcctaacttacctctgctataatcgggtaggctc

SEQ ID NO: 1588 - DNA, 72 bp, Homo sapiens
attatttcaaaattaaaaagttaacaggccaggcccggcggctcacacctgtaatcccagcactttgggaag

SEQ ID NO: 1589 - DNA, 72 bp, Homo sapiens
aggtaaaactagaccctatttgtacagaacatattcgtctttgtgcaggcgcacacagaactgggggagctc

SEQ ID NO: 1590 - DNA, 72 bp, Homo sapiens
gccttctgctggccccttgaggaggagggttgagacgaagaacaagaacagcccccagaggctcagaaggcc

SEQ ID NO: 1591 - DNA, 72 bp, Homo sapiens
gggattaagcaatagtcaggactggggtctggaggcggtgcagggtggggacagaggggaggaggagtcggc

SEQ ID NO: 1592 - DNA, 72 bp, Homo sapiens
aagcacgcagaccccagcccctctttccacccagacgagatgaccaaagccccatccctgactgtctcagct

SEQ ID NO: 1593 - DNA, 72 bp, Homo sapiens
gaaagtcactcaaataaccaagctgtagagctactcgattacatgattacacatatgggtttttcaaacaaa

SEQ ID NO: 1594 - DNA, 72 bp, Homo sapiens
ctataaaaaggcctgacacattgggcaccagaccccggctgcctgctcccaccacacgcgtcccgttctgcg

SEQ ID NO: 1595 - DNA, 72 bp, Homo sapiens
caagtttcaccacctttctgtgcgaccgatcaaaacgcagtctgtctgggagcctcaggcaggcggctctag

SEQ ID NO: 1596 - DNA, 72 bp, Homo sapiens
tctgaaaatggatctgggacatctccatcctcaaacgtctgctacccttatttttaaattgcataatctttc

SEQ ID NO: 1597 - DNA, 72 bp, Homo sapiens
acctggggtagggactgggggaaggagacattttgcgtctctctggctcccagcacaataagaaatgtcagc

SEQ ID NO: 1598 - DNA, 72 bp, Homo sapiens
cccctattgtgaaagacttgtggctgcgtagccaacggccattctttttgaaacagtcatttctgtttttga

SEQ ID NO: 1599 - DNA, 72 bp, Homo sapiens
acttggctctgcattctatatgactaacccaagcccggtaacttccatcatgctattataagtacaatatgc

SEQ ID NO: 1600 - DNA, 72 bp, Homo sapiens
ccaaggaacactgagggtgctgcatgggtcagaagcgaagagcacgtgggaacaggcaggagctgggccgct

SEQ ID NO: 1601 - DNA, 72 bp, Homo sapiens
ggtgtggaggctgatgaactgtcacagccttatgccgtgtgggcctttgatagctcttgagcaatagggcat

SEQ ID NO: 1602 - DNA, 72 bp, Homo sapiens
gacttaccaggtgtcacccagcagttctgggactgcgtgaggctcctgttctggttcccagccatgagctca

SEQ ID NO: 1603 - DNA, 72 bp, Homo sapiens
gtggtttctgtttggcctccagtgcttgcctctcccgtgtcctatccgcccagacctcagacctcagagaag

SEQ ID NO: 1604 - DNA, 72 bp, Homo sapiens
gggccaggccgttcctaatgcccaacccatagatacgatgacggggctttcagtgaaggattcagctcctat

SEQ ID NO: 1605 - DNA, 72 bp, Homo sapiens
acttcctggttacagttctatcacatgagaggactcgtggtgtacaattagctgtctctgctgcaataccca

SEQ ID NO: 1606 - DNA, 72 bp, Homo sapiens
tttcccttcagactcactggctctgcagccaaacacggtcccactataagctaacatcagcaacactgtcct

SEQ ID NO: 1607 - DNA, 72 bp, Homo sapiens
ggccctcctgaataaccaaagatagagaattaggacgaaggagggaggaagagaaaattgcaggaaattcaa

SEQ ID NO: 1608 - DNA, 72 bp, Homo sapiens
gtggtgtgacccttctatcagggcagggggaatgtcgggccttgtgcagaaatcatttggtgcgggaaacat

SEQ ID NO: 1609 - DNA, 72 bp, Homo sapiens
tgatcttcctgtgcatctggactgagaccactgggcgggtggatggggaaggcaggctggagggacacgagg

SEQ ID NO: 1610 - DNA, 72 bp, Homo sapiens
aatggggactgttctgaacttcccatacactttctcgcagcttctgcctgaggctgaaaccctttctggggt

SEQ ID NO: 1611 - DNA, 72 bp, Homo sapiens
ctggtttgggggatgggagacagaattttctgtgacggctctctctgaagagggagaagccacctgggaagc

SEQ ID NO: 1612 - DNA, 72 bp, Homo sapiens
tgctgcaattttgtttctctttcaaaacaatggctcgaaaatttccaaggaaatagcaagagggcgattccc

SEQ ID NO: 1613 - DNA, 72 bp, Homo sapiens
caggacatgaccttcctgtgctcaaaaccctcccacggctcccacctcacttggcagaaagtcaaagatctc

SEQ ID NO: 1614 - DNA, 72 bp, Homo sapiens
tgcccttggcctcccccaccctggccaggcccccacgggcctctttggagcccagccctttgtgtaccccgc

SEQ ID NO: 1615 - DNA, 72 bp, Homo sapiens
ggttgggaaaccgagggcagacggttcaagccttgcgcagggtcacatgctgggccctggcccccatccaga

SEQ ID NO: 1616 - DNA, 72 bp, Homo sapiens
tcaaaatctagagtagttttatttgggtttcattacgtaggcatgactcattggtcatatgactgaactcag

SEQ ID NO: 1617 - DNA, 72 bp, Homo sapiens
ccatcctgatgtaacacatctctgtagcctgaagccggcccagttcttggctcagagctactgcgtctgcag

SEQ ID NO: 1618 - DNA, 72 bp, Homo sapiens
actgtggtcatttgtagtgtattctttgttgctgacggcttcctgggtatgcatcggacctgtattgcagca

SEQ ID NO: 1619 - DNA, 72 bp, Homo sapiens
gtttatcagggtgggctcccttcctgcacttcctgcgcttggagacattggagagcccacattgaaaatctc

SEQ ID NO: 1620 - DNA, 72 bp, Homo sapiens
aggagctgccaccccctcctccagctccccacccccgtgccccactggaagacaggcttgatttccacatcc

SEQ ID NO: 1621 - DNA, 72 bp, Homo sapiens
aggaacaaggagttcctgagagtgttggcaccccacggtgttgatgtccggtagttccctgctgtgaaccct

SEQ ID NO: 1622 - DNA, 72 bp, Homo sapiens
ccagagggcaggagcaggtctgggtgagctgcaagcgggcggcagcagagcatggccctggggaggagggcc

SEQ ID NO: 1623 - DNA, 72 bp, Homo sapiens
tgggatttcgaggctagtcatagacagggagatttcgcaatagggtaatagagactgcaaaataagctgagt

SEQ ID NO: 1624 - DNA, 72 bp, Homo sapiens
cccgcctcatcctcccaaagtgctgggattacaggcgtgagccacccagccctggcccctagttgagtcatt

SEQ ID NO: 1625 - DNA, 72 bp, Homo sapiens
aatacttgaacagtaagaataacgaacaccagctacgagcaccagagccttacacacaagatcccatttact

SEQ ID NO: 1626 - DNA, 72 bp, Homo sapiens
ttgagaggaaggagggagggaaggagcaggggccccgggtgcttactcccaggtcttcactgcagcctgggg

SEQ ID NO: 1627 - DNA, 72 bp, Homo sapiens
caccattgaggaagcagccaggttggagactcaggcggagggcctggcagatttcctgagtgctctctgcaa

SEQ ID NO: 1628 - DNA, 72 bp, Homo sapiens
tgaaggatacaaagactgccaagtgttttacccttcgggagctgtaagtgtaggggagggacaggctcgaac

SEQ ID NO: 1629 - DNA, 72 bp, Homo sapiens
tttccttctcccttctgcagggtgagtggaagccccggcagatcgacaacccagattacaagggcacttgga

SEQ ID NO: 1630 - DNA, 72 bp, Homo sapiens
ggccatttcttgcagagatgccctgctccctgacgcgctcgctcttctccagagttggccaaaggtgctctt

SEQ ID NO: 1631 - DNA, 72 bp, Homo sapiens
tctttagggatagactgatttctctgcctgtgaaacgcagaaatatgtttccagataattccacctatgctt

SEQ ID NO: 1632 - DNA, 72 bp, Homo sapiens
ctccctggggcctgtgcagatggagggagagagggcgcacatcagtgttgactctgagctacagaagcttcc

SEQ ID NO: 1633 - DNA, 72 bp, Homo sapiens
caccatcccacagcaaaacttctcagaatattgtccgcacatgttgcctatgcttcctcaattcctattcac

SEQ ID NO: 1634 - DNA, 72 bp, Homo sapiens
ttctgacagtattgccaaattgttcacagtaaagacgggcccatttccagtcttaccagccatgtgcaaaaa

SEQ ID NO: 1635 - DNA, 72 bp, Homo sapiens
aacaacaacttctatttaggttttgatacggaaggcggtgcggcggagcgaatgcagggcaaccacgcaaca

SEQ ID NO: 1636 - DNA, 72 bp, Homo sapiens
aaagccctccctgcacacgcccctgctggctagcacgtggctgctaatgggtacttcccttggttttctgca

SEQ ID NO: 1637 - DNA, 72 bp, Homo sapiens
gccctggccacgcctaggctgcacccgatggggagcgagaaaggggaagtagtgctcagtgccctgccgtcc

SEQ ID NO: 1638 - DNA, 72 bp, Homo sapiens
accctcttctccatctctaaaaaataatctgtaggcgagacattgcaacatctttttctgtgaaccatgagt

SEQ ID NO: 1639 - DNA, 72 bp, Homo sapiens
aactcatgaacttactgacaagtctgtccaggcaccgtctctcccacacaccacaaattcacttgttagatc

SEQ ID NO: 1640 - DNA, 72 bp, Homo sapiens
ggaggagaggggcggctggtgggcagacggagggacggatgggtgggcagatgaatggacaagaagatgcac

SEQ ID NO: 1641 - DNA, 72 bp, Homo sapiens
ttcaaagcagtttttatattgtacagtaaagacatcggaccccatggctgctcaaacaagtgaatctacaga

SEQ ID NO: 1642 - DNA, 72 bp, Homo sapiens
gataggaggtctcaatgccacgggcaggggcaactcggactgtggggcgtggaaaggactggggaagactgg

SEQ ID NO: 1643 - DNA, 72 bp, Homo sapiens
aaggtctgacgcaatcaccacacgcatgtgggactcgtgagataaacagatctggagggggaaccagtgctc

SEQ ID NO: 1644 - DNA, 72 bp, Homo sapiens
agaaaagatctgtggactccaccaccacgaaatggcggcaccttatttatggtcactttagagggtaggttt

SEQ ID NO: 1645 - DNA, 72 bp, Homo sapiens
tgcctccaaggggcctgccacaactcagcatcagccgtccttgccatatgggaatgcacttgtggtgtaact

SEQ ID NO: 1646 - DNA, 72 bp, Homo sapiens
aaacccgaggcaccagatttacagctaatgagtggcgaaatcagatcctcttcctcccagtctatccttcct

SEQ ID NO: 1647 - DNA, 72 bp, Homo sapiens
agagccgcgggcatccacccgggtagggcaggaggcgtggaggcaggcacaggctatcctttcgttatgacc

SEQ ID NO: 1648 - DNA, 72 bp, Homo sapiens
tagaagtcggcttgatggggcttttagggaaacaacggctttcctgtttttgtttttcttcttcttcttttt

SEQ ID NO: 1649 - DNA, 72 bp, Homo sapiens
cagccacgatcccagctctccctccagcgacttcccgcagcctgaacctcccagctccggctagaaaatccc

SEQ ID NO: 1650 - DNA, 72 bp, Homo sapiens
ttcctgtgatgaaggagaccaaaatttagctatgacgctggggtgaggcagttagctgagctttgcccttgg

SEQ ID NO: 1651 - DNA, 72 bp, Homo sapiens
gggttgtccaggctcagctagcccccagtcctccacgagaacctcacaggggctggtctggccacacagtgt

SEQ ID NO: 1652 - DNA, 72 bp, Homo sapiens
agcttgaactgcgtggatgactcacaggactactacgtgggcaagaagaacatcacgtgctgtgacaccgac

SEQ ID NO: 1653 - DNA, 72 bp, Homo sapiens
tctgtcgtccaggctggagtgtcgtggtgtgatctcggctcgctgtaacctctgccttctgggttcaagtga

SEQ ID NO: 1654 - DNA, 72 bp, Homo sapiens
ctgaaaggtggtgtgctggccccacctgaatcactcgcaactccaaagaggtgtgtgatgcaacttcccatt

SEQ ID NO: 1655 - DNA, 72 bp, Homo sapiens
gcagatgtgtcatgctgggcagcacctctccctcccgacacctgcatggtgactcaaactcccaggtaaagc

SEQ ID NO: 1656 - DNA, 72 bp, Homo sapiens
ctgctttagtgaatagttcacacccgttttcgcagcggagatgtcggccactgggaagaatcaaggaccaag

SEQ ID NO: 1657 - DNA, 72 bp, Homo sapiens
gacagcacttgagcccaactcctccacccaacctccgtttcttctaggctcctggggggaccaaaaaggaag

SEQ ID NO: 1658 - DNA, 72 bp, Homo sapiens
gagttaaagagtctggggaaaggaggatattccaccgtagggggacccatgtgatcagaagaaaagcaagtc

SEQ ID NO: 1659 - DNA, 72 bp, Homo sapiens
tgcccaaagatagccctccaatctgtagagaccagcgcacatggcccctggctgccagccccaaagcctgga

SEQ ID NO: 1660 - DNA, 72 bp, Homo sapiens
acccacatgccaagcctggtggccctcctcagcaacggaactccaaggcaagaaggctgagaatgaggccca

SEQ ID NO: 1661 - DNA, 72 bp, Homo sapiens
ggaactcaccttcatccccatccacatccaccagccggtccaggaagtctctcacacgtgagacacactgca

SEQ ID NO: 1662 - DNA, 72 bp, Homo sapiens
gcaggcagagccagctggggccagcacccccgccacagccctgacctctgcctgggcagaagcaccatgagg

SEQ ID NO: 1663 - DNA, 72 bp, Homo sapiens
gggctctgcaggcacagaggggagctgtcgcgctccgcggcccagggttccgcctggctggcaccacccctg

SEQ ID NO: 1664 - DNA, 72 bp, Homo sapiens
aaagctatgacccagtttgctgagagctgcaatgacgaacattggctctgtgcccagaggcccaagaaggcc

SEQ ID NO: 1665 - DNA, 72 bp, Homo sapiens
ctccgctctgaatacccccggccacgccacacgagcggcctcaaccctgagacgcccagggaacatgagctg

SEQ ID NO: 1666 - DNA, 72 bp, Homo sapiens
accagctcatgcatgttgtgtgctgagtgagttcacgttgcagttagtagtggcagtgaggagagctgagtc

SEQ ID NO: 1667 - DNA, 72 bp, Homo sapiens
ggttgacagactgatggctgcttcctggagctctgcgttaagaaaaactctgagggtgtttctgggcctaat

SEQ ID NO: 1668 - DNA, 72 bp, Homo sapiens
gatgacaccattcctcctctaacatggtccaatctcgtgcttgttctgctttacaggaaagttgactcatac

SEQ ID NO: 1669 - DNA, 72 bp, Homo sapiens
cggagaccatgagacggatgacgaaccagcaccagcgaaggggagggccccggagggcatgagacagatgag

SEQ ID NO: 1670 - DNA, 72 bp, Homo sapiens
aacacagctggcattgggcaagatactactgtgggcgaggcacagagagagtataattagtgatgtgctcca

SEQ ID NO: 1671 - DNA, 72 bp, Homo sapiens
atggattggaaagccaaatggcaatttccttgcctcgggctggattaaaccaaggcaatcacatttccatct

SEQ ID NO: 1672 - DNA, 72 bp, Homo sapiens
tatgttcccatcaaaggtcaactcctgtgcttgtgcgatagagcccacctcctttgccttctcaagtttatt

SEQ ID NO: 1673 - DNA, 72 bp, Homo sapiens
ttcccggagggggtgggaggtatgatggggggtgacgggaagctggggtttcgggacatccaagctccagac

SEQ ID NO: 1674 - DNA, 72 bp, Homo sapiens
tgggggattactatgtgatagatacaaaaaacagccgctgccttgagagagctcctagtctaaaaagggacg

SEQ ID NO: 1675 - DNA, 72 bp, Homo sapiens
caggcccccaatctgcgcctgtgaagaccaagccgcgggctgagattttcgtcctgccccctccctgccgcc

SEQ ID NO: 1676 - DNA, 72 bp, Homo sapiens
ggaagtgatgcaagagttctgtcttagatattttacgtttgagttaccttaaaacctccaagtagaaatgtc

SEQ ID NO: 1677 - DNA, 72 bp, Homo sapiens
cattgaggaagctgggccgccatctggaggcgcctcgcacgcgggacacgcatggaggacctgccaggtgcc

SEQ ID NO: 1678 - DNA, 72 bp, Homo sapiens
cgcaggaggtcagggtcaaggtcatcagcagggcacgctgcagctgcccgactgcactacacacaagaggag

SEQ ID NO: 1679 - DNA, 72 bp, Homo sapiens
tgagggaggagagtggtggcggctccggaggtggacgtgtcaattatatcctggagctccgggaagccagat

SEQ ID NO: 1680 - DNA, 72 bp, Homo sapiens
cactgtcttgggtgcgggatttaaccagtcacacccgtcagccccttggaacgtcacagtgttcccttaaag

SEQ ID NO: 1681 - DNA, 72 bp, Homo sapiens
aaattgtaagggactggctttactctggctgtttccggaaaggcaggcccagccagccctcccgtctctctc

SEQ ID NO: 1682 - DNA, 72 bp, Homo sapiens
agaacagcaagcagttggggcagtgaggggtcctgcgctttgtcacatgaggctggtttggtttcacacagt

SEQ ID NO: 1683 - DNA, 72 bp, Homo sapiens
gagaatactaccatgaatgaaatagacagaaatcccggctgtcattgggctttgtctgagggccattgggga

SEQ ID NO: 1684 - DNA, 72 bp, Homo sapiens
tgctgaaaggaattgggggacagtataggaatgttcgggtgactactgattaatgtagtgaagatgatctgt

SEQ ID NO: 1685 - DNA, 72 bp, Homo sapiens
tgtcatcacaggcttgggtcaaggggcgggtcagacgccagtcacatccgctcactgcccacagccaccccc

SEQ ID NO: 1686 - DNA, 72 bp, Homo sapiens
tcaccctgcactttgcagcccggccacaaagcaagcggccacacccagggttgggtttggaactgttccagg

SEQ ID NO: 1687 - DNA, 72 bp, Homo sapiens
tctcttaccagcacttaaaaagttaacaacagcaccgaatagaattgctcaaggcagtgaaggttaaaccag

SEQ ID NO: 1688 - DNA, 72 bp, Homo sapiens
ttcaggcctgcctttcctctccctgaaagagcctgcgctggccctgggcagagagaaggatgagaagtgagg

SEQ ID NO: 1689 - DNA, 72 bp, Homo sapiens
ccacaggcaaaggaaaccacagggggtggctgaggcggctgctgtccctctttagcctgaacctgaggaagg

SEQ ID NO: 1690 - DNA, 72 bp, Homo sapiens
gcatggagctgaaagatgttgccaaatccactgggcggtggcgctttgtgagatgtggcgacctgtaacagc

SEQ ID NO: 1691 - DNA, 72 bp, Homo sapiens
tctcaagggacaggggctgagatgactcacatcagcgccattgggtccagctggacctcgaggtcctggggg

SEQ ID NO: 1692 - DNA, 72 bp, Homo sapiens
agggacagactgctctctggaaggctggccagacacgggaagatatgtaggcctagtcaggcgactgccagg

SEQ ID NO: 1693 - DNA, 72 bp, Homo sapiens
attacacagtcaccagggctccactgaaaattaggcgggtgatcaagtttgaggcttttaaatggcagtcat

SEQ ID NO: 1694 - DNA, 72 bp, Homo sapiens
ttcattcattctctgccagactttacaactgtcctcggtgtgtttttaggttgtgtaactttacacaaagtg

SEQ ID NO: 1695 - DNA, 72 bp, Homo sapiens
cgtcggcgtgccgcctgccacagcactgccgcctgcgtggcaccgacgccttcgcttctgcattttctggat

SEQ ID NO: 1696 - DNA, 72 bp, Homo sapiens
ggaaggggggacccgagcgttcgtgtgtcatccagcgcaggctttgatgaggctgatgagtcatggagccat

SEQ ID NO: 1697 - DNA, 72 bp, Homo sapiens
ctggcgggtagcccgggggaaggagggggctgtagcgggtgggagggcccaggcctggctcaccctgccctg

SEQ ID NO: 1698 - DNA, 72 bp, Homo sapiens
tttacaatatagaggacatctcagttgaattaccacgttatgtccaccaatttgtattcagatggaaaccat

SEQ ID NO: 1699 - DNA, 72 bp, Homo sapiens
atttcagtcacaacactcccaattgaggagtgccacgggagtgtgaagagagcttcagatgtcaaacatttc

SEQ ID NO: 1700 - DNA, 72 bp, Homo sapiens
ggtggagagaacaggccagcctggggtgcccaagacggacttggtccaagccaatttggctctgtcctgctt

SEQ ID NO: 1701 - DNA, 72 bp, Homo sapiens
agccttcaatagttgatcagcttcctggagccaggcgagggagggctggatgagataagagccttggcttgg

SEQ ID NO: 1702 - DNA, 72 bp, Homo sapiens
ggagcagttggcggtggaggccttgggcaatttcccgtgttcccactgagtggggctgtccctgggcctggg

SEQ ID NO: 1703 - DNA, 72 bp, Homo sapiens
ttctgcctctttgcttcagcatgattacccagaggcgcacccgtgccgtggcctgcccgtcgtctatgcacc

SEQ ID NO: 1704 - DNA, 72 bp, Homo sapiens
ctgcaagagggccgggatctttgtcactgtcatgccgtgaccctaacacttagtgcagggcctgatttgcag

SEQ ID NO: 1705 - DNA, 72 bp, Homo sapiens
tcatacttccgggtaccacatacacagcccttgaacgctccccagcccagtccacttacacaactcttgtat

SEQ ID NO: 1706 - DNA, 72 bp, Homo sapiens
caagattccagggtggcgcaaaactacatcctcgccgtaagccttaaaacatgactgtgccccactgacaga

SEQ ID NO: 1707 - DNA, 72 bp, Homo sapiens
agcaaacaggatgccccctacgcgtacacgcacagcggccaccccgccccacacacaccccgagctggggca

SEQ ID NO: 1708 - DNA, 72 bp, Homo sapiens
gatgtcctcaccacctccgtcactgcctttacttccgatactttggcagcaatccatcctctgcttcactgt

SEQ ID NO: 1709 - DNA, 72 bp, Homo sapiens
acgtttagtgacaagcttctccgaagcaggagcatcgtctccccacgtctcctgtcggctccctccagaagc

SEQ ID NO: 1710 - DNA, 72 bp, Homo sapiens
gagatcagtgagaatcgcttccaatgacagatcgccgtgtgacattcgcatactacccagaaggagtataag

SEQ ID NO: 1711 - DNA, 72 bp, Homo sapiens
ctatagcacagcattcacggtgctctgaagttgcacggccattacaaataaggaaacaagaatgtcacgaca

SEQ ID NO: 1712 - DNA, 72 bp, Homo sapiens
tgctactctgctctgggtggtcattgtgaaaagcccgcaccaaccatgccagtggcagccagacgaggacac

SEQ ID NO: 1713 - DNA, 72 bp, Homo sapiens
atccattcaaatatgtggcataaactggtgagatgcgtgtctgtagaggtacagtcttgctataaaagagaa

SEQ ID NO: 1714 - DNA, 72 bp, Homo sapiens
cagacacagggtggccacggccactagcggcaaggcggctgccccaagagcgcggtggcatggccaccaaag

SEQ ID NO: 1715 - DNA, 72 bp, Homo sapiens
gcgctgtctgtggtggctgtgtgtggcaccagccacgagacaaacacggtcctcagggtgacgaaagatgtg

SEQ ID NO: 1716 - DNA, 72 bp, Homo sapiens
gctcagcatttcccttcctgtcctggttggacactcgaattcccccaccctctctatgcccgaaagctggct

SEQ ID NO: 1717 - DNA, 72 bp, Homo sapiens
gaaaaatggaggaaacgcgcacacacacgcgcgcgcgcaggaacagctgactcagcaaggccccagaccagg

SEQ ID NO: 1718 - DNA, 72 bp, Homo sapiens
ctgaacattcgggattcctgtatttccatgctcaacgcctgataccgacaacctaattatttcccattttgc

SEQ ID NO: 1719 - DNA, 72 bp, Homo sapiens
ggaggctgggaagggcatcgggagacacgggcctgcgccccctacccgggccccggcccacctgtccgcaca

SEQ ID NO: 1720 - DNA, 72 bp, Homo sapiens
gctgctgctcatctccctccctcctatgtccggcccggttgcctcccaggaaaggtaaacatgcagaggcaa

SEQ ID NO: 1721 - DNA, 72 bp, Homo sapiens
tcatctgccatttcaggctgggctgaaagatcctccggcacaacaaagctgggcccaggagatatcctgcat

SEQ ID NO: 1722 - DNA, 72 bp, Homo sapiens
ggcccaggcgtggtttgtggccttggtgagcatagcgccctcccatcgttgcagcggggcccttcctgtggc

SEQ ID NO: 1723 - DNA, 72 bp, Homo sapiens
tggataaaagagtcatgattcctcctagtctatcacgtggtaatgccaaggtcagaaaaatcatttgttatg

SEQ ID NO: 1724 - DNA, 72 bp, Homo sapiens
tttgttatctaaagaccttcctgaatcctttcctacgtctacccattcttcaaggctgttcagactttattt

SEQ ID NO: 1725 - DNA, 72 bp, Homo sapiens
ggaaagggcaagattgcccaacactcccgagagctcgtcctcagccccaacctgggaaagcctgcagggcct

SEQ ID NO: 1726 - DNA, 72 bp, Homo sapiens
tccccttgggggcagcagagccaaatgcttgggctcgggcccaagctgcctgccctgcaggggtccagggag

SEQ ID NO: 1727 - DNA, 72 bp, Homo sapiens
agttgcttaagcccccatcataaaattgttcagatcgaaaaatatgatctggttagaaagaaagcactggcc

SEQ ID NO: 1728 - DNA, 72 bp, Homo sapiens
tcctcttggtcaatcccaaagtgcccctgggccttcgcacactgttgttgtttagagccacatcaatatgac

SEQ ID NO: 1729 - DNA, 72 bp, Homo sapiens
ggcccagttcttgctgttcctctctatctaagagacgtgtgggatctttgggtgatgaaatactttttctct

SEQ ID NO: 1730 - DNA, 72 bp, Homo sapiens
accctcagctggaatcccagcccctcattgtgtaacgttgagcaagtcacctgacctctctgggccttagct

SEQ ID NO: 1731 - DNA, 72 bp, Homo sapiens
tcttgttgtgcatgaaggagctggaggcgggacaccgaggaaggcgactcagtgtcactgtccgtcatgggt

SEQ ID NO: 1732 - DNA, 72 bp, Homo sapiens
gagaaagctacacaacggagttccttggcttttgacgggggaagtgttgagaaatgaagggaagggcatcca

SEQ ID NO: 1733 - DNA, 72 bp, Homo sapiens
gtatagcatctttctccacctaccaaatggggggccgtgccatctctgcctctcggtgaggagatattacga

SEQ ID NO: 1734 - DNA, 72 bp, Homo sapiens
gattttcatcagtctctgtttcttactatggctgtcgtgtgctgtgtcctgtgataggaagtttcacatctc

SEQ ID NO: 1735 - DNA, 72 bp, Homo sapiens
aaatcttactaatttagtcacagcctttctcagcacgatttcccaaacccagttccacaatttaggcaatgt

SEQ ID NO: 1736 - DNA, 72 bp, Homo sapiens
ttctgtagatgcctaaatgatgtgggttgagaaatcgtgatcttagcttttagtagtatatttttctgttta

SEQ ID NO: 1737 - DNA, 72 bp, Homo sapiens
tctagtccaactttctcctctacagattgtgaaagcgaggtgggaagtaatttacccaggctcatacaagcc

SEQ ID NO: 1738 - DNA, 72 bp, Homo sapiens
tttcatagcttgggttaggcaacagcaaagcatcacgctgagcgccgggaccttctgagtgcaggcggtggg

SEQ ID NO: 1739 - DNA, 72 bp, Homo sapiens
cctgatcctgcagctctggccctgctcccccagcccggacaagcaaggaggagaaaaaccaggcccaactgg

SEQ ID NO: 1740 - DNA, 72 bp, Homo sapiens
ccaaagaataatgtttggggcaactctgaaattaccgcccaggctgcagtttgggtttgcataacgtcttgg

SEQ ID NO: 1741 - DNA, 72 bp, Homo sapiens
ttgggctgaatggaggtgtgtgtgccctgagagggcgggagagcctggcccaggcttcagaggcccctctga

SEQ ID NO: 1742 - DNA, 72 bp, Homo sapiens
gcccaatgaaacaaaggcactggtgtcatgtgtaacgacccaagcctgtatcatctaatgttacaaccctga

SEQ ID NO: 1743 - DNA, 72 bp, Homo sapiens
gagctgtggacaagtcaggcctgcctgcctatcaccgccctcaggagccactcccaacccctcccagtgtcc

SEQ ID NO: 1744 - DNA, 72 bp, Homo sapiens
gcgtccggtcaggcttcagacggcagagcggaggccgccgggctgcggctgcgagcgtggcgtgttcgcgga

SEQ ID NO: 1745 - DNA, 72 bp, Homo sapiens
ccaggttcactgaggggccctggtctccccgcagtcgtcccaggctgccggctcccctcgacagctctctgg

SEQ ID NO: 1746 - DNA, 72 bp, Homo sapiens
gagaaagagaacagagataaggaggctggacataacgcatttgtaatggtgaggtacattgtgcttctagaa

SEQ ID NO: 1747 - DNA, 72 bp, Homo sapiens
acccaagagcaacctggaactaagttattcggcaacgaactgttccactttgttgtgaggcaatagatgtgg

SEQ ID NO: 1748 - DNA, 72 bp, Homo sapiens
aggtctgcctgaatcctttgtttactagtatttcacgttcaggtttccctgaagttaggattcagccttaag

SEQ ID NO: 1749 - DNA, 72 bp, Homo sapiens
cccaagaggacctgggcatttccctctctagtccccggaggaaccatgaaaccaggccaggaagcaaggcta

SEQ ID NO: 1750 - DNA, 72 bp, Homo sapiens
agagctgttgcaagaagcagaagcagtaacaatggcggacacttagcaagagtttacagcagcctggagatg

SEQ ID NO: 1751 - DNA, 72 bp, Homo sapiens
gggttgtggggagggcagcctgactccagccttctcgtgatgaaaactctgtccagttctgctactgaaggg

SEQ ID NO: 1752 - DNA, 72 bp, Homo sapiens
tgacctccagcctcctgcctgtacctcacatttgccggacacaaaaggaagctagaggcaaaggaagctggt

SEQ ID NO: 1753 - DNA, 72 bp, Homo sapiens
gctgccccctggcctggttggcaggggttggcacccgggcaaggaactgtggtatgtgagtgggtttggggt

SEQ ID NO: 1754 - DNA, 72 bp, Homo sapiens
gggggctccagtcctgtacccactactgcaagtcacgtggcctggggcagggcttctcagagccctgtcccc

SEQ ID NO: 1755 - DNA, 72 bp, Homo sapiens
gggaagcaggaacctgggaatccctaacatgcttgcgagcagtgacctggagactggcctctgcctcacccc

SEQ ID NO: 1756 - DNA, 72 bp, Homo sapiens
ctcaagctaagaaagaaattagatctctacaccaacgacatgatttccccagacaaaatcagctgatggtct

SEQ ID NO: 1757 - DNA, 72 bp, Homo sapiens
gctagagaccaacaaacttacttgtgagagccacacgtgtctggcaaagaacttgaaaaataatcttcaaaa

SEQ ID NO: 1758 - DNA, 72 bp, Homo sapiens
acctgcacccaggccttcctggcagtacagactcacgctcaggacagtgtttcatgcctgtctttctaagga

SEQ ID NO: 1759 - DNA, 72 bp, Homo sapiens
tcccagaaagcgacgatggtgctgtgctggcagaccgaatgttttttaaaacacaaagcttgcagtcctgct

SEQ ID NO: 1760 - DNA, 72 bp, Homo sapiens
agcaacgagaggccccggcacacctggaagctggccgcgaattcggcctctgggcctgtgtgtctgtgagct

SEQ ID NO: 1761 - DNA, 72 bp, Homo sapiens
agggaggatcacttgagcccagaagtggctattcacgggtgtgatcacagaacctgaactagccaccgaata

SEQ ID NO: 1762 - DNA, 72 bp, Homo sapiens
ccacggaggtcctcacccggatggcactgtgagcccgagtgggcgatgtctgctctcccaggggcagggggt

SEQ ID NO: 1763 - DNA, 72 bp, Homo sapiens
ctcttcctcccatcagagcctgccctcgcaaaacccgatcttgaagaatatcaccgactacctgatcgagga

SEQ ID NO: 1764 - DNA, 72 bp, Homo sapiens
ggtgcgtgcgagcgggcgccaggaaagcgcggggccgccctaggggctaggcctttctttaaacagtgggag

SEQ ID NO: 1765 - DNA, 72 bp, Homo sapiens
tcttaccatcatcctcattttctagatagggaaaacgaggcagaagtgtggtcaagtaacttggccatgttt

SEQ ID NO: 1766 - DNA, 72 bp, Homo sapiens
ttacgtaaaaagcaacagagaacagcagcgtggggcgcatgcagcgactgtggatgtgacaggaccagacgt

SEQ ID NO: 1767 - DNA, 72 bp, Homo sapiens
ggatgatacgggacttgtttttgtttttctgttatcggaggatgccaagcaatgcagggctggacgatttca

SEQ ID NO: 1768 - DNA, 72 bp, Homo sapiens
ctaaacccatcttcctgccctctggttagggctggcggggatgtgggggatgggggtggggtgggggagggt

SEQ ID NO: 1769 - DNA, 72 bp, Homo sapiens
ggtgtccaagaagttccacttaggaactcccatttcgtttccatgtaacttggtcacatggacacatctgtt

SEQ ID NO: 1770 - DNA, 72 bp, Homo sapiens
tttctatttggtggctgaaaccacagaaatgcctgcgacggctctctttgagaatggctgcctcctaggggt

SEQ ID NO: 1771 - DNA, 72 bp, Homo sapiens
gagcaaagcctcagggaggccacatacgttctcagcgccatgcttggctggtgactggtcatgcaccattgg

SEQ ID NO: 1772 - DNA, 72 bp, Homo sapiens
gccttgaactgaggcaaacttccttaaaggggcaccgtccaattgaaatagaattggagctacaaagatgag

SEQ ID NO: 1773 - DNA, 72 bp, Homo sapiens
actaaggccagcacagccaggacagtgataggcaccgccagcaacaaggtcaccagagaagtggctcctgcc

SEQ ID NO: 1774 - DNA, 72 bp, Homo sapiens
aaaaaaagtcatgggaccagcatttgatccagggacgaaggaaaaacaagcccatgaagcaaatttaatgac

SEQ ID NO: 1775 - DNA, 72 bp, Homo sapiens
gtgttctgtttctcctgtgcatacagatcaaggagcggatgttatttctttctttctttccccaaggcgaga

SEQ ID NO: 1776 - DNA, 72 bp, Homo sapiens
cccaggctcctcccaagtgactgcacacagtgagtcggctgcatcacaccaggaataccattgagcaatagg

SEQ ID NO: 1777 - DNA, 72 bp, Homo sapiens
gccctctcaggcccaggaactggactgggctggtccgccttgcaatgccctctgtggcctggccccaccctc

SEQ ID NO: 1778 - DNA, 72 bp, Homo sapiens
aactcctgagggatcggtggggctgcccctcagggcgcgggacacgcggaggaggcgggagataaccgcgag

SEQ ID NO: 1779 - DNA, 72 bp, Homo sapiens
ctcttcagccgacagtctagccctgggcttctttacgtctgggtggctggattccgtgaggatgtgttgcaa

SEQ ID NO: 1780 - DNA, 72 bp, Homo sapiens
gtcaaagaggaccatgtaggctgtaatgtaattgacgagcaaggcagcagcttcctcaaaggtcatggcctc

SEQ ID NO: 1781 - DNA, 72 bp, Homo sapiens
tgcagaggcaaagcaatgtctgctgggaggccagtcgacacccaaagagaaagtcattgagtaagtagcagc

SEQ ID NO: 1782 - DNA, 72 bp, Homo sapiens
tccttattgacaaaacacggcccactgtgtatcctcgagattagtctagcccatgaattcaatgttaagttc

SEQ ID NO: 1783 - DNA, 72 bp, Homo sapiens
acaccaccacagcagcgagtggttgcgacagacgtcgtaaaacccgtaaagcccgagatatctgccactggg

SEQ ID NO: 1784 - DNA, 72 bp, Homo sapiens
tcatgtgggatgtccccttgaaagccccagtaggacgttgattttgagacataagggggagtctggagtgag

SEQ ID NO: 1785 - DNA, 72 bp, Homo sapiens
cggccaggtctgaggtgaagcaggaaggccccatacggggtggctaggaatgccctgtgtggactcccaggg

SEQ ID NO: 1786 - DNA, 72 bp, Homo sapiens
gcctggtgtgcaggtgcggctgccaggcccgcacccggcagcccccgccccctccccgcccagcggcctgtg

SEQ ID NO: 1787 - DNA, 72 bp, Homo sapiens
tgagcgcctgccttggctggctcctcaggcacacccggggctgtggcctgcagctgctcctgcactggggct

SEQ ID NO: 1788 - DNA, 72 bp, Homo sapiens
ccttccacccccggggtggcaaaggacattcattccgtggagggggaggggactgtgtaactcactctaaat

SEQ ID NO: 1789 - DNA, 72 bp, Homo sapiens
gggctgcagccccgcaacctcgcttctggattcttcgctgatccagtcaccggggaggggctgactggcagc

SEQ ID NO: 1790 - DNA, 72 bp, Homo sapiens
acaccttttctccagacgcgtcatgaagtacatctcgggagaaatgggaagtctccctcccccatcctggtt

SEQ ID NO: 1791 - DNA, 72 bp, Homo sapiens
gtcccgtctcctgcagttgttgacgttcagtaggtcgtcggttaagaaaagtggctccctggttgaccccag

SEQ ID NO: 1792 - DNA, 72 bp, Homo sapiens
tggccgctgaggtgagatattcaaatatcggtgggcgggtttttcccaggttaatcctctcttaactgactg

SEQ ID NO: 1793 - DNA, 72 bp, Homo sapiens
accaatccctgcccctgcgccctggggtcgtgtggcgccaagtaggtgctcaaaacatgagaagtgagattt

SEQ ID NO: 1794 - DNA, 72 bp, Homo sapiens
ttgggaaacactcgcagcggggctggcctcgggcgcgcgcgagtggggaaaggcctaggagcctggacatcg

SEQ ID NO: 1795 - DNA, 72 bp, Homo sapiens
ggaaactttccttggcagctttgatagtaaaattccgtacaggcagcgtttattgagcacctattacgtggt

SEQ ID NO: 1796 - DNA, 72 bp, Homo sapiens
agaagcctggccgtccgcagcctgtggtgcacgtgcggggcccatctgtgccgggtgtttgtcattattaag

SEQ ID NO: 1797 - DNA, 72 bp, Homo sapiens
ctctgtaagggctcagagatgctgtgatgtggcgtcgtgacagtgcattccaggaagggggatggatggtga

SEQ ID NO: 1798 - DNA, 72 bp, Homo sapiens
cggagaagggacagacttttcaccttagtcctggccgcccatattcagagaggccgactgtcttgttcattg

SEQ ID NO: 1799 - DNA, 72 bp, Homo sapiens
accaactgatacttagttccctgaaatatttacaccgttatatccccagtgcctgttctgtgcctgacacag

SEQ ID NO: 1800 - DNA, 72 bp, Homo sapiens
ctcggaaagttatgtaatcatcgggacggttatcccgattctagccagggcaaagttgaacgagcgcgtgca

SEQ ID NO: 1801 - DNA, 72 bp, Homo sapiens
catgacctcccaccctaggagggagggaaggacaccgtcctagggtataacctggcaataaaccgtgcctct

SEQ ID NO: 1802 - DNA, 72 bp, Homo sapiens
accaatgctaactccaccctgcatttgcagagatccgtcgctcacaccttttcttgtcttccgttgaaaaaa

SEQ ID NO: 1803 - DNA, 72 bp, Homo sapiens
tttaagccagctcatctgtggtattctgctatggccgtcctagctggctaataccatctgcaatccagattg

SEQ ID NO: 1804 - DNA, 72 bp, Homo sapiens
tgccagcctgtgaggaagctgcgtgtcacagggcccggcccagtgcctggggcttgacaccaccctcttgtg

SEQ ID NO: 1805 - DNA, 72 bp, Homo sapiens
gagatggatgtggtaatggttgcacaacggtgtgacgatactgaatgccgctgaactatacacttgaaacta

SEQ ID NO: 1806 - DNA, 72 bp, Homo sapiens
tctctttggttactcaatttcctcatggtgaaatgcgactaatgatgactctcctgcttattttagaacaca

SEQ ID NO: 1807 - DNA, 72 bp, Homo sapiens
ctgagcagcagcctgtggtcaggtgactaagacctcgccagtgggtcagacaggagcaaatgtgccccatgc

SEQ ID NO: 1808 - DNA, 72 bp, Homo sapiens
gaggtgcacacaccacatggctgcactcaccccagcggcccgtgtgctgcgccctgctcctccatggcctct

SEQ ID NO: 1809 - DNA, 72 bp, Homo sapiens
cacaagacaggaagggtctcctgaaggtggggtaacgtgttcagtgacaccgtgtcatgtgctaacagctga

SEQ ID NO: 1810 - DNA, 72 bp, Homo sapiens
tcaactggcactgcaatcctcacacattccagctccggtatgttactgtttgtgaacacaacaattctctgc

SEQ ID NO: 1811 - DNA, 72 bp, Homo sapiens
caggttgataccctcacctcccaaccccaggccctcggatgcccagaacctgtaggccgcaccgtggacttg

SEQ ID NO: 1812 - DNA, 72 bp, Homo sapiens
agactcctctgggctcccagccaggaacgtcgggccgccacccccacccttccactctcagagggcgaggac

SEQ ID NO: 1813 - DNA, 72 bp, Homo sapiens
atgtctgagggtgatctgagcactcttcaccaccccgtcagcccttagctttcgtctcatctccttgccaac

SEQ ID NO: 1814 - DNA, 72 bp, Homo sapiens
ctggaagcagagggcggtgcaaagaccttgagcggcggccggccgggcgcaggcccggagctggagctgggc

SEQ ID NO: 1815 - DNA, 72 bp, Homo sapiens
caatctcagctaagtgacaaatgaagctgctatagcgaccacactcctgctggcttatggccaaactcacgt

SEQ ID NO: 1816 - DNA, 72 bp, Homo sapiens
ctagccgggcccagcccccgagcagtgcagcctcccgagtgcagagtgcagcccctgcccgccctggcccag

SEQ ID NO: 1817 - DNA, 72 bp, Homo sapiens
gaagcaatcccattgaaaggttgtgaacaccctttcgagatctttctccttgtgggccccgcatacttgcaa

SEQ ID NO: 1818 - DNA, 72 bp, Homo sapiens
cccacagagtgtccagatttcctctgtgtacttgccgaccaacctggcttgccagcaccctggaggtttatc

SEQ ID NO: 1819 - DNA, 72 bp, Homo sapiens
gggcaaggccacctcttcccaccccctggaacctccgtcggtcagggtaggccctcttgggagtttctgctg

SEQ ID NO: 1820 - DNA, 72 bp, Homo sapiens
caagtgacagagcagtctaggcattctgtgtttctcgatcaggacagataagtaagtgggggttcctggggg

SEQ ID NO: 1821 - DNA, 72 bp, Homo sapiens
ttaggccccccaagagctgcaggatgtcaggcctacgcaaccttttaactttccaggtagagaccgaggctc

SEQ ID NO: 1822 - DNA, 72 bp, Homo sapiens
acattaaactctgcttccgggtgacactgaacacacgagaggaagtgagagctagttggacagcctttcttg

SEQ ID NO: 1823 - DNA, 72 bp, Homo sapiens
gggcaaaaacccctattgtgaaagacttgtggctgcgtagccaacggccattctttttgaaacagtcatttc

SEQ ID NO: 1824 - DNA, 72 bp, Homo sapiens
gggctgttttatgtgacagccactcccctgcctgtcgtgagggggcccgggtgttcatctcagattgatgga

SEQ ID NO: 1825 - DNA, 72 bp, Homo sapiens
agagggaatcagccactggaaagaagtcacgcagacgaagtggtgacagccacgacaggaaattgctcagcg

SEQ ID NO: 1826 - DNA, 72 bp, Homo sapiens
gggcggggtgggtgctcaggggcggcctttgtgttcggattagaagctggtgattgtcacattaagacctct

SEQ ID NO: 1827 - DNA, 72 bp, Homo sapiens
ctcaggcccccctcctctgaaacgggatgtgaacacgtgggccacagccctaaggactcctgacagaccaca

SEQ ID NO: 1828 - DNA, 72 bp, Homo sapiens
tcctcccggcctctccctcatctcggcctgggccccgcagaagccaccaccagggctcctggattccaccag

SEQ ID NO: 1829 - DNA, 72 bp, Homo sapiens
tggcactagccaaaactaaagtgaatgtgcttgaacgtgctcttcaaaacgaaaggcagaaggggtcaagcc

SEQ ID NO: 1830 - DNA, 72 bp, Homo sapiens
gcaggaatgctatgtgaaaaggccagaccccaaaccgttccacaggctgattgcaacaaagaaaaacctcag

SEQ ID NO: 1831 - DNA, 72 bp, Homo sapiens
atcccggaagagtacatcttccaggtgggagataccgtaggaacagaaactcagagaaaggcggagtccagg

SEQ ID NO: 1832 - DNA, 72 bp, Homo sapiens
cggtggcccaggctcagggcctctgtctggcgccacgtcctgctgcccagagctggggcgctcttctgggct

SEQ ID NO: 1833 - DNA, 72 bp, Homo sapiens
gagccaggagtgacccttagagtgggccccagggacgtcagccttcttggaaaacagctcaaggggtgaggg

SEQ ID NO: 1834 - DNA, 72 bp, Homo sapiens
aagcatttggacaactggctttaaatcaatttcaacgaaaattgaacacaagtaaccctcacctttttttac

SEQ ID NO: 1835 - DNA, 72 bp, Homo sapiens
ccaagacaggcgaaagagggcatgagctgaagacacgcactgagcagttgcctctcatcttgctgtgagtgg

SEQ ID NO: 1836 - DNA, 72 bp, Homo sapiens
caggagaatcacttcaacccgggaggtggaggttgcggtgagctgagatggcgcaattgcactccagcctaa

SEQ ID NO: 1837 - DNA, 72 bp, Homo sapiens
cctctatggtcttagattcttttttttttatagcccgcatgcttctttggaaagtgaggtaattgtgtcaaa

SEQ ID NO: 1838 - DNA, 72 bp, Homo sapiens
ttaaaggtagcgtatcccgagtttttcgttcctcccggtgggttcgtgggctggttactctagccgacttca

SEQ ID NO: 1839 - DNA, 72 bp, Homo sapiens
cacgttaatatgtaatttgctgatgccagggcttccgcttagagaaagttttcataagcataaccccttgcc

SEQ ID NO: 1840 - DNA, 72 bp, Homo sapiens
ccacggctctgagtcactggggctccgcgggctggcgtgccttcctctgccgcccacccaaccacccactca

SEQ ID NO: 1841 - DNA, 72 bp, Homo sapiens
tggtctggtgcacactggatgtaagttccttcccccgctagttggggcacggaagaccctagcattcctggt

SEQ ID NO: 1842 - DNA, 72 bp, Homo sapiens
acgccaaatgctcctctgtgggcttcacagacttacgaaagtcattttaattcccggcaatcctcaggaaaa

SEQ ID NO: 1843 - DNA, 72 bp, Homo sapiens
gccctgtccgggagtttttctgtccagctttccagcgctctgtgtaggcgagaggaggagttaaatccccaa

SEQ ID NO: 1844 - DNA, 72 bp, Homo sapiens
tctggattgaatgaattgccctcactaagaactgccgccaaccccaagggtttcttctcggcctggtgtccg

SEQ ID NO: 1845 - DNA, 72 bp, Homo sapiens
aaggcagggattgagcaagtccctctgcaggaaagcgtgtgcccatgtaatgtgtctagcagatgtaacttc

SEQ ID NO: 1846 - DNA, 72 bp, Homo sapiens
gatcactaggtgccaacattatgcgaagaactttacgtggacatcccatttaattctcagaagccgatcaca

SEQ ID NO: 1847 - DNA, 72 bp, Homo sapiens
ttaggtccatatcccctggtcacaaggagtggggacgaggaggactgggctcgttctttgtgtcttttggcc

SEQ ID NO: 1848 - DNA, 72 bp, Homo sapiens
ttgggtgagagctgtgggccacctcctacagctaccgctctggctgggttcccctaactaacagggccttcc

SEQ ID NO: 1849 - DNA, 72 bp, Homo sapiens
gtttcgttcccctcctccaggaagccccggccccacgccagccaggtccccacccctgccggccagggtccc

SEQ ID NO: 1850 - DNA, 72 bp, Homo sapiens
ggctccacccaagagcaacctggaactaagttattcggcaacgaactgttccactttgttgtgaggcaatag

SEQ ID NO: 1851 - DNA, 72 bp, Homo sapiens
ctcaagaattagtcatttcatcatccctcactagacgcagcaagaagggataaagaggaaactggaaatttg

SEQ ID NO: 1852 - DNA, 72 bp, Homo sapiens
ttcagcttccagctccttccaagataaaatgtggccgagcaaagaggagagcaggaaatgcaagtaaataag

SEQ ID NO: 1853 - DNA, 72 bp, Homo sapiens
gagtctgagagtctctgtcgaaacagagagtgagccgcatcagggagggagggagaaatggatgaggtgatg

SEQ ID NO: 1854 - DNA, 72 bp, Homo sapiens
acccgattctaacatgactctggtatagcaacacacgacagagagcaggccctaaaggaaatcaaagtattt

SEQ ID NO: 1855 - DNA, 72 bp, Homo sapiens
ggaagctgggcaaaggggatggaaggcgtccagcccgaccttaccaaaccccttgggcctcgtgggaagggg

SEQ ID NO: 1856 - DNA, 72 bp, Homo sapiens
atagtgagaataagctgaacatactgcccctcatgcgaagtcagaaaacagatctttatgcaaaacaaacgg

SEQ ID NO: 1857 - DNA, 72 bp, Homo sapiens
ccccgcaccagaacatgagactggcccctccaggacggagagggatgtaaactgccacccagggcttaatcc

SEQ ID NO: 1858 - DNA, 72 bp, Homo sapiens
tcagcagctgcgtgagtacaggaactggccctggacgcctacaggaagctgctggagggcgaggagagctgg

SEQ ID NO: 1859 - DNA, 72 bp, Homo sapiens
catataaacaaaaaacatagaagcaataaagcgatcgctggtatttcttttctcatgcagccaaattcgcca

SEQ ID NO: 1860 - DNA, 72 bp, Homo sapiens
aggaaggaaaagccaccctgccgtgagactggggtcgtggaatcacagcggccttaagcagtatgctggagc

SEQ ID NO: 1861 - DNA, 72 bp, Homo sapiens
ttcctgaggccccgcagtcctgcacacggtggtgacggacttccatttgtgtccagtgtaaaagcaaatccc

SEQ ID NO: 1862 - DNA, 72 bp, Homo sapiens
ggacacgggcttttcccagcggccagcacccctcccgcaggacctcgggttccaccccagcagcctctgttt

SEQ ID NO: 1863 - DNA, 72 bp, Homo sapiens
gtggggccagggtcccagggggcacaggggctgggcggtgacttacgtagcggtccctcagcgccttggcag

SEQ ID NO: 1864 - DNA, 72 bp, Homo sapiens
ccagctttttaaagtcactctccaacactcgtttccggctaacaagctttccagaaacgccacccattaccc

SEQ ID NO: 1865 - DNA, 72 bp, Homo sapiens
agctcagcagggctgtcactggctgtgtgtgtgtccgccttccatctctctctcgggggatttatgggcctc

SEQ ID NO: 1866 - DNA, 72 bp, Homo sapiens
gccctagcaacactgagctcagttctccatcaccacggaagttgaacaagatgacaggggctaaagtaaggg

SEQ ID NO: 1867 - DNA, 72 bp, Homo sapiens
gtggctgacggcgtgtggcacaggcggggtgagcccggaagggtgagcatgcgcctgctgacgcttcgttca

SEQ ID NO: 1868 - DNA, 72 bp, Homo sapiens
tggtccaggcgggcccaggcctcggcgatggcggtcgtgttgctcagcatgcacacggcacgctgcaccttg

SEQ ID NO: 1869 - DNA, 72 bp, Homo sapiens
ccaggtagagggtaaggaggaaagcaaggaggagacggtccgtgcccagggtaggcaccacccacagcactg

SEQ ID NO: 1870 - DNA, 72 bp, Homo sapiens
aagagaatcaatgttctttattcctgggcattattcgtgtgacattctgtaaagtgatgactcaggctatgg

SEQ ID NO: 1871 - DNA, 72 bp, Homo sapiens
cctgaacaagcccccgagtcccggtccttggagtacggtggcgacggtgtgtgtgtgtatatatagacatct

SEQ ID NO: 1872 - DNA, 72 bp, Homo sapiens
ggggcgggcggcgggacggcggccgggctgggcagcgccccttgcatagttggcccgatgaccatgctggcc

SEQ ID NO: 1873 - DNA, 72 bp, Homo sapiens
gggagattgtgcaatgacagagcagctccgcttcccggctccatttcaagcagccctggagggttttcagca

SEQ ID NO: 1874 - DNA, 72 bp, Homo sapiens
ctggctgcgtactggcccaccaagcattcgactggcgtgcccagccactctccgtcatcgcagagaagtgct

SEQ ID NO: 1875 - DNA, 72 bp, Homo sapiens
tgttttcccctgacacttacgctaccgctagacttcggtctgcctggcaacgggtatcttcccagaagctgg

SEQ ID NO: 1876 - DNA, 72 bp, Homo sapiens
ctgccgatggcttccacttcccagacaggcccagacggccccgccagcagccgagagacattcctcaatagc

SEQ ID NO: 1877 - DNA, 72 bp, Homo sapiens
gcaccagtgaggaaactgaggcacatgaagacgaccggaccctgcaaggactagacacctggcagcactagt

SEQ ID NO: 1878 - DNA, 72 bp, Homo sapiens
attatctttagttaataagaggaccctatattcaccggaaaacattacatcctgtgggtcactcttcccatg

SEQ ID NO: 1879 - DNA, 72 bp, Homo sapiens
tctttctgtgggatatatgatgcaacacaacaagccgtggattgggtgttgctttgtaaggaaaatcaatta

SEQ ID NO: 1880 - DNA, 72 bp, Homo sapiens
tagggggagcccaggctggcccagggagcagttggcggtggaggccttgggcaatttcccgtgttcccactg

SEQ ID NO: 1881 - DNA, 72 bp, Homo sapiens
gctgagaggtgcaccaatggctggatccaggcacacgcaggctccgagttcacagaagcagggccatcatgt

SEQ ID NO: 1882 - DNA, 72 bp, Homo sapiens
gggtcactggctgggaagggaacaacagtacttaccggagaccaccatggcctcatttgggccacaagtgaa

SEQ ID NO: 1883 - DNA, 72 bp, Homo sapiens
gccccgggctggtctgcccgtgtcacaggaggactcgcctctggtccctcagtggcctctgcaaaccctgag

SEQ ID NO: 1884 - DNA, 72 bp, Homo sapiens
gtgaagccaatcagaattttttaaagcataggatacggctgtgcatttgaagctggaagccactaacccagg

SEQ ID NO: 1885 - DNA, 72 bp, Homo sapiens
cactcacccggttgactaccaagtattgcctgaagcgaacggagcattcctgcaacggctccttttactgcc

SEQ ID NO: 1886 - DNA, 72 bp, Homo sapiens
gagttctcttctctaagaaggagttccctgtgcctcgtagtgagtggtgtgcctctgtttatggagagggcc

SEQ ID NO: 1887 - DNA, 72 bp, Homo sapiens
attgctgaatgaggggagtggctttccaagttaggcgtttaggggaagaataccaactgtcagggacgaatg

SEQ ID NO: 1888 - DNA, 72 bp, Homo sapiens
gtatcctgatttggtgatggttattcaaatctacacgtgataaaatttcaaagaaccatgtacacatacacc

SEQ ID NO: 1889 - DNA, 72 bp, Homo sapiens
tttctgcctgcaaatgggtgcgcgtcacccctccccgtcagggtgtcgccaggcctccgggaaccgaactcc

SEQ ID NO: 1890 - DNA, 72 bp, Homo sapiens
aaagggtataaaactactaaagccctaccaagaggcgacaagcctctctggaattaacagatatgctaatgc

SEQ ID NO: 1891 - DNA, 72 bp, Homo sapiens
gcaaggcttcaaatagcagcaaccagcaaatatttcgcccttcccgtggtttctggcagtgttgcagctgtt

SEQ ID NO: 1892 - DNA, 72 bp, Homo sapiens
ttctagagtgacgacagttatattaacatcttatacggctcacagcttttcggcagacaggctcatttatct

SEQ ID NO: 1893 - DNA, 72 bp, Homo sapiens
gatgcaatcacctcacagaactgtggagctgtaaacggccttgcagggaacaataaaccatctgagataatg

SEQ ID NO: 1894 - DNA, 72 bp, Homo sapiens
ctctgggcaccatttagtgcttatcttggcctctccgtggctttgagactgctgtccgtgtcttctttgcaa

SEQ ID NO: 1895 - DNA, 72 bp, Homo sapiens
ctcgcaagctctgtgaccttggggaattcactcaacgttcctgagcctccatttccttctctgtagaatggg

SEQ ID NO: 1896 - DNA, 72 bp, Homo sapiens
ctctctgagaacatccaaaacagagctgctgtgcccggcatcttttagaaggttagaagacagtgtgtggtc

SEQ ID NO: 1897 - DNA, 72 bp, Homo sapiens
cgtttacggtcacacgaaggaatcactacaccaagcgctgaagggacgcgtgtgagccccatttcgctggtg

SEQ ID NO: 1898 - DNA, 72 bp, Homo sapiens
gatgtgatctgagcaatagtgtggccttgtttctccgcttctggttgtggctgtgtgtacagggctacctat

SEQ ID NO: 1899 - DNA, 72 bp, Homo sapiens
cttctctagcttcctgctctgtgcacactcataggcgcaaccagatacttgggaacacagatgccctcaagt

SEQ ID NO: 1900 - DNA, 72 bp, Homo sapiens
aggcaggaatccagaggaacggggccagctggcagcgtctgggaaccggcatttgttctgaacaggcagtac

SEQ ID NO: 1901 - DNA, 72 bp, Homo sapiens
gacatgcagggctgagaggcagctcctttttatagcggttaggcttggccagctgcccacagcttcaggcca

SEQ ID NO: 1902 - DNA, 72 bp, Homo sapiens
gtagcacaactgttccccgaggcaggaatccagatcgcatttggagaaaagaaggcagccctttaacagccc

SEQ ID NO: 1903 - DNA, 72 bp, Homo sapiens
gaatgcctctcatgtgagggagtggtctatggaaacggcctggcagacccgcgtttgtttaattgagacaga

SEQ ID NO: 1904 - DNA, 72 bp, Homo sapiens
ccctgggtcttgcagtctgcatctcgggcttgccacgtgtgggagggtgagggtggggtccagggggagccg

SEQ ID NO: 1905 - DNA, 72 bp, Homo sapiens
atctataaagagttacaaaataatgtaatgaatgacgtaagagctgaatttacaagagattcattctttctg

SEQ ID NO: 1906 - DNA, 72 bp, Homo sapiens
aactcagattgtgaagacagaaaggctcatgcttacgtctcatgtctactgtttattctgagtaatatatta

SEQ ID NO: 1907 - DNA, 72 bp, Homo sapiens
aggctgaaaactagtcagtgacattagcatccagtcgcaaaccctgcccaatttccaaataggcagctgatt

SEQ ID NO: 1908 - DNA, 72 bp, Homo sapiens
cctacgaggaagactggcttccatgaagcaaggaacgtggctgactgtctacacttgcgctaacaatagctc

SEQ ID NO: 1909 - DNA, 72 bp, Homo sapiens
tccaggtcagcatgtcctggaagcagaactgctggcgcctaggcgtgccctctcggtgccctcagctcggcc

SEQ ID NO: 1910 - DNA, 72 bp, Homo sapiens
gaggagggagcccacaggccaagtcagcacccgcccgcccctagtccccagcacaatgctaagttgcagtgc

SEQ ID NO: 1911 - DNA, 72 bp, Homo sapiens
tcctgcgaggccttcacaaagatgattttgtcattcgctgaaagcgtgaagtgaatcaacggcctcctcttg

SEQ ID NO: 1912 - DNA, 72 bp, Homo sapiens
caccgcccagacagctttgtgaggcggacaaaactcggagccaagcggagaagccttgatgtcgccgccggc

SEQ ID NO: 1913 - DNA, 72 bp, Homo sapiens
ctgccacgtggggtggaaggggaggggcctcaccacgtgggctgacacttttggaggaaggcattgcctaga

SEQ ID NO: 1914 - DNA, 72 bp, Homo sapiens
aggccacacccatgctgaattctctgcctgcctcccgagtgcatgtgttcctaagtgaggctgagtgcggct

SEQ ID NO: 1915 - DNA, 72 bp, Homo sapiens
tgaattagatgtggtattcaaatccttagctgccgcgaagacacagacagcccccgtaagaacccacgaagc

SEQ ID NO: 1916 - DNA, 72 bp, Homo sapiens
cagttctgtgtgtggatgggaccagagaagccggccggccgagctaatgttcttcccttcctggaagagagt

SEQ ID NO: 1917 - DNA, 72 bp, Homo sapiens
tggagtggccttgtctttgtggaaacagatggccccgagccagctgccctctctcctctacacgtggctgag

SEQ ID NO: 1918 - DNA, 72 bp, Homo sapiens
ttggcacatacaaatttggaaggagacaggaaattcgtgtccaacacaatgcgtgagaggcatgatgagagc

SEQ ID NO: 1919 - DNA, 72 bp, Homo sapiens
ggagtaaaattccagactgggacaagcgttctttccgcaggcagctttgcatcatcagcttcctcttacaca

SEQ ID NO: 1920 - DNA, 72 bp, Homo sapiens
tttggctaagacactcacagaagaagtaacttcctcggttggggaagaagaagatttagcctaggccagtgg

SEQ ID NO: 1921 - DNA, 72 bp, Homo sapiens
ttctgccctctcacgcccgctgctactccagacgtcgtaagttgctcttttatgggatatctctggcttgac

SEQ ID NO: 1922 - DNA, 72 bp, Homo sapiens
acccaccccgctggccgcagccggaggctgccacgcggacaccgtctcaagcctctgagcattgctctgagc

SEQ ID NO: 1923 - DNA, 72 bp, Homo sapiens
ggtgaatcatggcccagaccacattcacatttccccgggggtgggcaagcgtgttgatcaccggaggggcag

SEQ ID NO: 1924 - DNA, 72 bp, Homo sapiens
tctgagacggagccttcagcagacttagcagcctccgaggatagctgaccttggcttactggcagttttggg

SEQ ID NO: 1925 - DNA, 72 bp, Homo sapiens
tttaactatcttctttcgtaagatactgtgagtctcgcaaggttcaagctaaatctctattgcatgtttctt

SEQ ID NO: 1926 - DNA, 72 bp, Homo sapiens
tgtttttgatattctgcactcaagcaattcactcacgttggcctcccaaactgctgggattacagctgtgag

SEQ ID NO: 1927 - DNA, 72 bp, Homo sapiens
cagaagtgaaactgaccacaggcaagtcagaggctcgccaggagggccaggtcacaaccccacagctcccag

SEQ ID NO: 1928 - DNA, 72 bp, Homo sapiens
agcaggggcctcccagcacagcagctggtgcccttcgccactgctcacccctccctgccccaacacctggcc

SEQ ID NO: 1929 - DNA, 72 bp, Homo sapiens
gtgtgtgtgtgtgtagtgcggagcttgttaacagacgtgcatgcctggcctgtggactgtgcagtaagtgtt

SEQ ID NO: 1930 - DNA, 72 bp, Homo sapiens
ggaagggttcctctgccacgggccaccagccccaccgtaaccgcacgccctcagccccaagcccgcgcacca

SEQ ID NO: 1931 - DNA, 72 bp, Homo sapiens
gtgtgtggctagtcagtgctgacagggccttagaccggagctgctgtcctaaccagtatatgataccgcacg

SEQ ID NO: 1932 - DNA, 72 bp, Homo sapiens
gctctaggagccccagggtaggtttctgctggagtcgtagggcctattttgggggaagttgtgcacagaaac

SEQ ID NO: 1933 - DNA, 72 bp, Homo sapiens
ttgaaccccagctgcaggcaggacgggattatctgcgcagggtagacccccagattcctgccagagcaaagg

SEQ ID NO: 1934 - DNA, 72 bp, Homo sapiens
tcctgggggaagtgacagcccgtggatctggcctacgcctctcgggcctctgtggcctcagagcgtctgggc

SEQ ID NO: 1935 - DNA, 72 bp, Homo sapiens
ctttttcttccccttcttatcacctttgggaggaacgtaatttttcatctccctgtcatagcgagctttgtc

SEQ ID NO: 1936 - DNA, 72 bp, Homo sapiens
gcttacctctctgttattcctctccaaaaatgctacggctgttgggctgaccatatggtccttcatttcctg

SEQ ID NO: 1937 - DNA, 72 bp, Homo sapiens
cctttgacctggctggcacatcttaccggtttctgcgctaacaatgagttgaaggaaatcttgaacgcgcgt

SEQ ID NO: 1938 - DNA, 72 bp, Homo sapiens
gtgcaattttcattttcgcaagcccagttcctgtgcgatctccagcacaatttaggtgctcaacaatgctga

SEQ ID NO: 1939 - DNA, 72 bp, Homo sapiens
gaccaggagccccatctgatccagggagccctgctcggccaggggggccctggagtgggaagagaatgcaaa

SEQ ID NO: 1940 - DNA, 72 bp, Homo sapiens
cagatcttacttcacttcctggcagcgttcagcatcgttgagccttaacacccttttctcctgacttctatg

SEQ ID NO: 1941 - DNA, 72 bp, Homo sapiens
gcattgcaggaggggagaccctggaggagagagcccgcctcaattgatgcctgcagattgaatttccagagg

SEQ ID NO: 1942 - DNA, 72 bp, Homo sapiens
accccgcaacttggggctggacagagcttctctttcggtttccctaatgtgtttgaaagagagtaacagagg

SEQ ID NO: 1943 - DNA, 72 bp, Homo sapiens
cctcgtggggcctcctttctagatgaggatgggggcgcagagcagatgacgagggatgggttagaagctgct

SEQ ID NO: 1944 - DNA, 72 bp, Homo sapiens
gctcagattagtgagaaagcaaagacccaagcttgcgggcctgttctgaatggcctgttcccagcaggttgt

SEQ ID NO: 1945 - DNA, 72 bp, Homo sapiens
agttagagaccaacttgggcaacgtaggagacctccgtctccacaagtaaaattaattagccggctgtggtg

SEQ ID NO: 1946 - DNA, 72 bp, Homo sapiens
ggacatagagttgactgcctcagtgggtcccacctcgggggtgggaaatgtaacctcatgagggccactgta

SEQ ID NO: 1947 - DNA, 72 bp, Homo sapiens
aagaaatacttgtgaaacacatgaataaaggttaacgaagggcaaaggaaacaagcctttattgatgatttt

SEQ ID NO: 1948 - DNA, 72 bp, Homo sapiens
ctgacagcacttctaccctagccgggcccagcccccgagcagtgcagcctcccgagtgcagagtgcagcccc

SEQ ID NO: 1949 - DNA, 72 bp, Homo sapiens
ttagctacaggctgcttatttgtttcctgaggggccggtcagtgccctgacccctgttttccctctttcctc

SEQ ID NO: 1950 - DNA, 72 bp, Homo sapiens
aagagagaaaaaggcactggggaggagttgagtctcgaagaacagtctaacataaaggtattccagccggga

SEQ ID NO: 1951 - DNA, 72 bp, Homo sapiens
ctcacttcccccggctcaggattcctagcaagggccggaaatctgggcagggagcgggaatcgaagcccggg

SEQ ID NO: 1952 - DNA, 72 bp, Homo sapiens
cttggcccctagataactaatctccagaacattctcgccttgcaaaactgaacttctatggctattacacaa

SEQ ID NO: 1953 - DNA, 72 bp, Homo sapiens
ccccgtcccccgcccagggatgcacacacggggcacgagtcgggcaggaaggaaacgcagataccaggcagg

SEQ ID NO: 1954 - DNA, 72 bp, Homo sapiens
cagggtggtagagccggaagattggattccatctccgcaaggattgagaaaaacggactcaccgactgaact

SEQ ID NO: 1955 - DNA, 72 bp, Homo sapiens
agagccgtgaaggctgtcgagcccacacaaactcccgctggagaaaactgtgtccacaggctgtgtctgacc

SEQ ID NO: 1956 - DNA, 72 bp, Homo sapiens
gggaaagggtgtttggtgttgctaagcaaagacggcgacttggacagtgggagcctatggtgacatcttgat

SEQ ID NO: 1957 - DNA, 72 bp, Homo sapiens
gcagcaggcaccaggttacagcattgccacttctacgtttgtcatttttacaaaaaagaagcaaagtctacc

SEQ ID NO: 1958 - DNA, 72 bp, Homo sapiens
gtggttggtcctggagggggccccaccccaacccccgctcagcctctgcccatgccagggccagcccggtca

SEQ ID NO: 1959 - DNA, 72 bp, Homo sapiens
catctggcctgttgcactcttctcctttgccccaccgaagcctctgtcacactgtcacagcagcgggcctgc

SEQ ID NO: 1960 - DNA, 72 bp, Homo sapiens
ttggtaatgttgagggggcagttgcagggagtgggcgggggaggagggagtggccagaaaggacagttaagc

SEQ ID NO: 1961 - DNA, 72 bp, Homo sapiens
ggctgcgcagggcgcttgcgggccagtgcaagttccgggtgggcgtgggctccgtcggcccctcaggccccc

SEQ ID NO: 1962 - DNA, 72 bp, Homo sapiens
gaagtaagatgaaggataaagaacccctacattttcggctgagaaattggccatctaattagctatacagtt

SEQ ID NO: 1963 - DNA, 72 bp, Homo sapiens
gaaaagtcacagttacaatgacaggaacagaaacacggacagtcaccaagggccagacacacagcgggggtc

SEQ ID NO: 1964 - DNA, 72 bp, Homo sapiens
caagtgggctgaaacctgaggcacatgaacagctacgccgggttgggttgggaaagagtcggaaatagggga

SEQ ID NO: 1965 - DNA, 72 bp, Homo sapiens
aacgaggcattgtgaaaatagggccagctgctggtcgggctctctgaccccagacctcgccctcccggataa

SEQ ID NO: 1966 - DNA, 72 bp, Homo sapiens
taggggcctgggctggggggatggggagggcacatcgtgactgtgtttttcataacttatgtttttatatgg

SEQ ID NO: 1967 - DNA, 72 bp, Homo sapiens
ggcactctaagggcctctgcaggaaccagtctggccggctgcaggctcctggccagctcgggcctcattggg

SEQ ID NO: 1968 - DNA, 72 bp, Homo sapiens
ttctgcctttcagtagctaagtttccctaaagtggcgcaagaactaattgtacatcccttccccagtgagat

SEQ ID NO: 1969 - DNA, 72 bp, Homo sapiens
cactggagtgaacttttgtaagccaacagattcatcgtaaatctaatgatgaactgtcctaatttattacca

SEQ ID NO: 1970 - DNA, 72 bp, Homo sapiens
taacttcaaacaaagataattgcgtaaccttggctcgtgtctttttccccactctatggcaatggggcttct

SEQ ID NO: 1971 - DNA, 72 bp, Homo sapiens
tccccagccctctccaaggcccgctttcactgtaccggggttttctatttatggatccgccctgctacccgc

SEQ ID NO: 1972 - DNA, 72 bp, Homo sapiens
aggtcttcctcttcaggggccaaagcagaggctggcgagtcagggtgcttgcaaagaggaagcccaggagtt

SEQ ID NO: 1973 - DNA, 72 bp, Homo sapiens
tgtctcacacgagcagccgcatttagccaccgagtcgggactgaaatattcctgagggagaagaaccctgag

SEQ ID NO: 1974 - DNA, 72 bp, Homo sapiens
tgggaagaaggggcgccctcgctgtgcaagggagacgcccccaaccccaccagcatcctctgggcagtcatc

SEQ ID NO: 1975 - DNA, 72 bp, Homo sapiens
tccccggagtctggccccttctgttggttgagcaccgtgtctgcggggtttgtctgtgctgttgtgtgttgc

SEQ ID NO: 1976 - DNA, 72 bp, Homo sapiens
ctggcacttccagttttcagcagcttccagcttttcgtctgcttatcccacagagcactgggaaatgtggtg

SEQ ID NO: 1977 - DNA, 72 bp, Homo sapiens
tcttgcccattacgtcatttcatcaggccttaccgcgactgcctcaggccttaccgtggccgccccaggctt

SEQ ID NO: 1978 - DNA, 72 bp, Homo sapiens
tccagaccacagggcctgagtgtggggagggcagccgtctaggaaggtggtggagggttgttaccttgaggc

SEQ ID NO: 1979 - DNA, 72 bp, Homo sapiens
ttccttcaaaagttcttctaagaactccagcgactcgccaagttgcccactgagaactctgggccaggaaac

SEQ ID NO: 1980 - DNA, 72 bp, Homo sapiens
aaccacaacaacaaaagaaatgctggttcacttctcgtgcagccctattacaaatcctttgggtgtagcagc

SEQ ID NO: 1981 - DNA, 72 bp, Homo sapiens
agttacacaacatttatagtcgacgaggactggtgcgttggcactaatcactacgacttaagggcaagtgaa

SEQ ID NO: 1982 - DNA, 72 bp, Homo sapiens
caaactcactggtgagtggagggcgcctgccccctcgggacccaggggaggacaggacaaggtcatgatagg

SEQ ID NO: 1983 - DNA, 72 bp, Homo sapiens
cgtcagcattaagaaatcaggaaacgggccgggcgcggtggctcacgcctgtaatctcagcactttgggagg

SEQ ID NO: 1984 - DNA, 72 bp, Homo sapiens
tctttcccttaagtttcagcccaacagatctctttcgtcagctgttatcattgtaaaaatcatcagttaaag

SEQ ID NO: 1985 - DNA, 72 bp, Homo sapiens
caaaggatcagagggtgttggtgaagcaatgtccccggggaggcctggtcccacccactcatcctgcatgaa

SEQ ID NO: 1986 - DNA, 72 bp, Homo sapiens
cgattcccctctgccccccaactcttccatcccagcggatgggaaacagcgagtccagccgcctccccacct

SEQ ID NO: 1987 - DNA, 72 bp, Homo sapiens
gggagtgtatacaggagaagtggccccgaagcctgcgttagtcaggtgattgatggctgaccctgggcaaaa

SEQ ID NO: 1988 - DNA, 72 bp, Homo sapiens
ccctgaggttccctcacagcgaatccaccgaagagcgctcccatccacagccggctctttgaatacttaaag

SEQ ID NO: 1989 - DNA, 72 bp, Homo sapiens
agcaagcttggcttagtaaatcctctctgggagtgcgaacaaccaccaccacaaccacaataatgacaaccg

SEQ ID NO: 1990 - DNA, 72 bp, Homo sapiens
cgtgccccgcggcctctggcacacggccagacgcccgccaggctgagcccccaccaggccctacctggcgag

SEQ ID NO: 1991 - DNA, 72 bp, Homo sapiens
ggaacctacactctccccgctcgcctaccccagcccgctcctctcagccgctggaggactcttcagggcaag

SEQ ID NO: 1992 - DNA, 72 bp, Homo sapiens
cagctgtgctttctttgcctgtcttctcaatgccacgttcatctccatttcacaaccaagcaacagaccaag

SEQ ID NO: 1993 - DNA, 72 bp, Homo sapiens
cagacactccctgcctccagcacttcccaactctccggctggacctcacctttcgggatttgtcaatgcgac

SEQ ID NO: 1994 - DNA, 72 bp, Homo sapiens
gatgaaagcgtctgtcgctcaaaggcgtcacagtccgtcacattaagataaattttcagaagaaacgcaagc

SEQ ID NO: 1995 - DNA, 72 bp, Homo sapiens
ggaggcgtcgctgtacccgcccagggccggacgctcgtagggagaatccaagaccccagagtacttctctgc

SEQ ID NO: 1996 - DNA, 72 bp, Homo sapiens
caggaaggcccacgaggtcccatatgccagcgtcccggttcccaactcttcacaggccatgtggccaccctc

SEQ ID NO: 1997 - DNA, 72 bp, Homo sapiens
tcctctgcattcgacagatgaggaggttacagctgcgagactgtaggcggttgcccgggcgctcttccaagt

SEQ ID NO: 1998 - DNA, 72 bp, Homo sapiens
gctgagctcttactagctccttgcaacaaaacaagcgaatgtgaaaagtcttaaacactcagctttctggtc

SEQ ID NO: 1999 - DNA, 72 bp, Homo sapiens
acttcccggtacttaaaacagcctctggcactcatcgagcattagctgttattgttgctgccgctttttgtt

SEQ ID NO: 2000 - DNA, 72 bp, Homo sapiens
gtgtctggcataataaaataggagctgttcctctccgttggaatagtagggcaggacttgtgcaacactgtg

SEQ ID NO: 2001 - DNA, 72 bp, Homo sapiens
ccgaaaccaggaggcgaggtccccgggagggaggtcgccgaccacacttgtgagggctgtgcagagttcccc

SEQ ID NO: 2002 - DNA, 72 bp, Homo sapiens
cggccgtgcgcccggcgggcatgaattagctgtgccgcctggctgctgacgggacgcctcgcctcgactgaa

SEQ ID NO: 2003 - DNA, 72 bp, Homo sapiens
agaatcagtcagcagaggagatgagttctctatgccgtctcacatttatccccaaagcccacggaggctgtg

SEQ ID NO: 2004 - DNA, 72 bp, Homo sapiens
ccatccccagcccgcaatactgcccatcactgaaacgtcccctccgaggcctgcagcagcctgagtggccct

SEQ ID NO: 2005 - DNA, 72 bp, Homo sapiens
ctttatccagtgcaagcactttgtaggattagctccgagagccctatggggtaggcacagctgtcactgttt

SEQ ID NO: 2006 - DNA, 72 bp, Homo sapiens
gcagtgatctctccatacatcctaaggtatagtcacgctgaggttcactcatctatttttgaacacattaca

SEQ ID NO: 2007 - DNA, 72 bp, Homo sapiens
agctgttttgagggcacaaatgaatccttttcttccgcttatcctggtcctgaggggcagggatgagatgga

SEQ ID NO: 2008 - DNA, 72 bp, Homo sapiens
cacagctcggaggaggcttcttctctagaagttagcgaccggctgtaccctttggctcgaaaaaagtagtgc

SEQ ID NO: 2009 - DNA, 72 bp, Homo sapiens
cacaccatactctacctggaacagctgctaaactccgctcccacagccaaagataggaggggccaacaggag

SEQ ID NO: 2010 - DNA, 72 bp, Homo sapiens
cagtgcttccccggcagctccgcgtgctgcgggtgcgggaacagcgctgggactggcatccctgcagagaga

SEQ ID NO: 2011 - DNA, 72 bp, Homo sapiens
gttgctgttttaaaagggtttgctagccagcctgccggatctgacagaaagagtagctgcctcccctggtgt

SEQ ID NO: 2012 - DNA, 72 bp, Homo sapiens
tgtgatggctacctgggaggctgcggcaggagaatcgcttgaatctaggaggtggaggttgcagtgagccga

SEQ ID NO: 2013 - DNA, 72 bp, Homo sapiens
ctggcaggacacaggggttgcccaggctacagatccgggttcaggcccagccgtggggactgttcacctctg

SEQ ID NO: 2014 - DNA, 72 bp, Homo sapiens
agagtgttaccgcgggatgtcgtcatccacctccacggggcaccagccaaagatctcacacgtcttcacagt

SEQ ID NO: 2015 - DNA, 72 bp, Homo sapiens
cacgcttcacgcttcacggctgaaaaaggcagccccgacaatggagccttgtccccggcagcaactctaacg

SEQ ID NO: 2016 - DNA, 72 bp, Homo sapiens
ctgtctgcgggcaatgcacacagccttctccacaacggagcccatctttgcgtcagggacagtttgccggca

SEQ ID NO: 2017 - DNA, 72 bp, Homo sapiens
ggtcctgcacagctgctggcaggctttggtccttgcgggctgttgtctggagtcccgtgcacctcgggagat

SEQ ID NO: 2018 - DNA, 72 bp, Homo sapiens
acttggtgttaggaccactcggaagacctgcctgtcggacgcctgactgtggttcccggggggccggagctc

SEQ ID NO: 2019 - DNA, 72 bp, Homo sapiens
atcagggcttcacacccagactccggggccgccggcgagatgtacaggcccttcccaaagcccagctggcca

SEQ ID NO: 2020 - DNA, 72 bp, Homo sapiens
acaggatctaggttatgttaaaacgagtactggaacgcagaagtcactaattgcccaaccaaaggatcagaa

SEQ ID NO: 2021 - DNA, 72 bp, Homo sapiens
cgggccttctgcgtgtggaaggcagaggtctgatgcgtccctgcctgagttcttcctcctggacaaggaaga

SEQ ID NO: 2022 - DNA, 72 bp, Homo sapiens
aaaggaggctcaggggaccctcccatcaggaccatcggctgcccaaccctgactccaggctggacactggag

SEQ ID NO: 2023 - DNA, 72 bp, Homo sapiens
agtgcgtcctcttccgtcctcctgggcgtgcaggccgtgcagggaggaagcacgtcttgagggaggagtgct

SEQ ID NO: 2024 - DNA, 72 bp, Homo sapiens
aaggtggcttgtcaccttacaaagctaaccccaaacgtaaaatgtaaagcacaaatagatttggagttagaa

SEQ ID NO: 2025 - DNA, 72 bp, Homo sapiens
caggggaaggtgtccgttaactttggggaacgctacggactcagattatatacttttaaaaggagttacaat

SEQ ID NO: 2026 - DNA, 72 bp, Homo sapiens
ccagagttctgagaaagttgattctgaccatttgccgatgtcttgttgctttcgtggaggagagaattctca

SEQ ID NO: 2027 - DNA, 72 bp, Homo sapiens
ggttcccatccctgaagaagatgggccaagacaggcgaaagagggcatgagctgaagacacgcactgagcag

SEQ ID NO: 2028 - DNA, 72 bp, Homo sapiens
cttcccaagggcagggctcacatgcatcatcttctcgctctggctgtttcaggaagtgatgggagtggggaa

SEQ ID NO: 2029 - DNA, 72 bp, Homo sapiens
tccttcccttttccctgccatcttttctccactgacgcctgctaacagctcccgtcgcaccaggtatctgtt

SEQ ID NO: 2030 - DNA, 72 bp, Homo sapiens
ctcaataagtctgcagtggccaagggagaaagccacgaacagcagccgagtctgtgcccttacacggctggt

SEQ ID NO: 2031 - DNA, 72 bp, Homo sapiens
ccgataggccatttgcgcaccaagtggtcaaacaccgtttcaaatgaccgggtgaacagcacttccaatgtg

SEQ ID NO: 2032 - DNA, 72 bp, Homo sapiens
gtggcagctttgcttacgcttgcccagagatcttacgaggcttgccctacaaccctttcctgtctgacacct

SEQ ID NO: 2033 - DNA, 72 bp, Homo sapiens
cccaccttggcctcccaaagtgctgggatttcaggcgtgagccaccacacccggccaaaactgtttattctt

SEQ ID NO: 2034 - DNA, 72 bp, Homo sapiens
gaggccaaagtggagcgggtcaccggggctcactccgggaggcaggaggccgtgtcactcaaggtcaacttc

SEQ ID NO: 2035 - DNA, 72 bp, Homo sapiens
aagtagcaaaagtttattaagcacagtaacactctcggagaggggagagtgggctaagctctgtgaaatgag

SEQ ID NO: 2036 - DNA, 72 bp, Homo sapiens
gttagctatggacttatcttttgtggtttgtattacgttaagttccttctatgcctaatttgttgagagttt

SEQ ID NO: 2037 - DNA, 72 bp, Homo sapiens
ctccagcacaagcctgggcaggtgcagcctcggtgcgcagtttggaaggggtgacgcgcaggtctgagaatg

SEQ ID NO: 2038 - DNA, 72 bp, Homo sapiens
aacatgggactttccagaaggaccacagctcctcccgtgcatccactcggcctgggaggttctggattttgg

SEQ ID NO: 2039 - DNA, 72 bp, Homo sapiens
ttttttttttagatgaggaaagtgaggtacagagacgttaagcagcttgcccaaagtaaggcatctctgcta

SEQ ID NO: 2040 - DNA, 72 bp, Homo sapiens
acccttctgactgttgccacgtagttcttagtttccgggaatttggggattttttcctcccccttcttccca

SEQ ID NO: 2041 - DNA, 72 bp, Homo sapiens
gggaggatgagacaatcaactgtttggttgagccacgttaggtttgaaatgtctacgggactcccgtgggga

SEQ ID NO: 2042 - DNA, 72 bp, Homo sapiens
tgattttcctcttctttgtctaagagatgagtcatcgcctttatgcctttaattttcagacttcaaactcat

SEQ ID NO: 2043 - DNA, 72 bp, Homo sapiens
tcctggtccatatccagactcctgactcctgatggcgtgtgcagctcctacattaactctttcatgggactc

SEQ ID NO: 2044 - DNA, 72 bp, Homo sapiens
tgtcaactagtttaccagagacgaaggtaaagtcccgtctcctgcagttgttgacgttcagtaggtcgtcgg

SEQ ID NO: 2045 - DNA, 72 bp, Homo sapiens
ttgaccatgcatggtttgcacctgggggatgcacccgggggtgcttgaccatgcatggtttgcacctggggg

SEQ ID NO: 2046 - DNA, 72 bp, Homo sapiens
tgtacccaagaagataactcacaaggcaaggaacacggaagctagggtgtgttgggcaagtaagcagaggtt

SEQ ID NO: 2047 - DNA, 72 bp, Homo sapiens
ctgtcttctcacgcctcagttgcttgttgctgtgacggtcgcccactcctcctgccagtgtctgtgctgctc

SEQ ID NO: 2048 - DNA, 72 bp, Homo sapiens
caacaaaaatacacagtcataacaagaaaaactggcgcctggcacaatcaactctcagtttcctcttcactc

SEQ ID NO: 2049 - DNA, 72 bp, Homo sapiens
cgcgcaagtttcccgggaccctcagagttgcactccgaagactccagattccgagagttgcggaaacgctac

SEQ ID NO: 2050 - DNA, 72 bp, Homo sapiens
ccatatcatcctaaaatctcaagtggaggaaagcacgcattagggaaaaagcagcatgcttgtgtgaaactg

SEQ ID NO: 2051 - DNA, 72 bp, Homo sapiens
tgagccaccccgggcctgcccaacgtgaaggctggcggagtcagcccctccgagctgcagcctgctctctgg

SEQ ID NO: 2052 - DNA, 72 bp, Homo sapiens
ttggaaggggccttgctgagtggcgcaaggccgagcgttcccagcagggggagaaacccttcacaccccagg

SEQ ID NO: 2053 - DNA, 72 bp, Homo sapiens
tgggaggttggcttgagtccagatggcagaggttgcggtgagctgtgattgcataattcaagaagctaatga

SEQ ID NO: 2054 - DNA, 72 bp, Homo sapiens
gcagttatactttccaattctgcctagaacctccacgcttcagtgcaggacttttaaaaattaaaattatat

SEQ ID NO: 2055 - DNA, 72 bp, Homo sapiens
ggccgtctgccaggagttctgcagcaggaacttcacgatgcccagctggttggtgcacgcggccagggacag

SEQ ID NO: 2056 - DNA, 72 bp, Homo sapiens
ggaacatatttttcctatttgctcaccagcttaaccgtctctcccagtttcacactcccagagctgccaaaa

SEQ ID NO: 2057 - DNA, 72 bp, Homo sapiens
ggatataattctcctggtgcgccgtttcctaagcccgtcagaaaagcgcagtattcgggtgggagtgacccg

SEQ ID NO: 2058 - DNA, 72 bp, Homo sapiens
tcccatttcctgctggtggtgccatgcctcagtggcggtcaccttgtggctgttctgccacccctcgggcat

SEQ ID NO: 2059 - DNA, 72 bp, Homo sapiens
ggcccatctgccacctgctcacccatgtccctcagcgtctggccagctgtgccccaggcgaggcatggtcct

SEQ ID NO: 2060 - DNA, 72 bp, Homo sapiens
ggcctccctgaaaacctccgaagtgacagccaccacgaatcttcagctgatgcattgcacaaacactgtcct

SEQ ID NO: 2061 - DNA, 72 bp, Homo sapiens
tttaaccttgtgtccccagttagactccatcaatccgcaccagcgcccttcaccctcatgggagggggtgtt

SEQ ID NO: 2062 - DNA, 72 bp, Homo sapiens
aactcaaaatgcagacacaataaagaatacactaacgagtctgtttgggctttttaatcagcagaattcatt

SEQ ID NO: 2063 - DNA, 72 bp, Homo sapiens
tgtctcccaagacttcaaataggtaagcaacagaccgtttcgatgtgtgcacatgtgaggtatcatcagttt

SEQ ID NO: 2064 - DNA, 72 bp, Homo sapiens
aggaggaggaggagggagggtgagatagaggcgctcggagataccctttctaggattcttgtgtttcacaat

SEQ ID NO: 2065 - DNA, 72 bp, Homo sapiens
cacaagggcaggatgggcccaggcctttcctaccccgaggcccccagctgaggagcccgcttcctccacact

SEQ ID NO: 2066 - DNA, 72 bp, Homo sapiens
ttggtcagattcaagagaactgaaccacaggcctgcgtggaacctcagtgtgtgaagtaaagggattaaagg

SEQ ID NO: 2067 - DNA, 72 bp, Homo sapiens
tgtggcacacatggtgcaaaccacactttattatgcgtgctactacccagcgacgtgtgagcctcttgtcac

SEQ ID NO: 2068 - DNA, 72 bp, Homo sapiens
tgtcactgagtattacatcacacccagcctacacacgcacggggcccggcgctcacacacacgcggaggaca

SEQ ID NO: 2069 - DNA, 72 bp, Homo sapiens
tggccctgtgtcccctccaacgtgcatcctgagctcgcaccctgtgtggaacccaaccagctgcttatcaac

SEQ ID NO: 2070 - DNA, 72 bp, Homo sapiens
ggttttctctttgtctgccttcccccaacactctgcgttgactggaggtgactatgctattggggtatgtat

SEQ ID NO: 2071 - DNA, 72 bp, Homo sapiens
gatgtggggcatagcaaggcagtgcccagttgggacggtgcctgggtgggaggagggcgagagaagagtgct

SEQ ID NO: 2072 - DNA, 72 bp, Homo sapiens
taatctttacgacctcagtgagggtcagaagtgtccgcgagccctgtaggcgaggagaggcctggctgaggg

SEQ ID NO: 2073 - DNA, 72 bp, Homo sapiens
agcgtggtgggatcttgtggccattgagaaatccccgggtggtaagacagccaaaataacttttcagaacat

SEQ ID NO: 2074 - DNA, 72 bp, Homo sapiens
tttatctaggaatgcttctgttgaaattgctacggcgcatggtaccgtcacaaaactcttttattattctgc

SEQ ID NO: 2075 - DNA, 72 bp, Homo sapiens
tttctgacatgatgcatcctgatcctgcaaaggcccgagccatctgcagaggttggggtgggaggtccagcc

SEQ ID NO: 2076 - DNA, 72 bp, Homo sapiens
atagtgcagagcctcgtatgtttgtcagttcatgccgagatgaaataaatcacgcagaaagtgccagtcctc

SEQ ID NO: 2077 - DNA, 72 bp, Homo sapiens
caagatagtaaggtggggcaactgcagacctcatccgttctctcagggatcaccgtccttccttgttaatga

SEQ ID NO: 2078 - DNA, 72 bp, Homo sapiens
atcattttcatagaacctaatggcagctgtatgtacgtctaagacttcttttgtgtaagtcgaatgttcttc

SEQ ID NO: 2079 - DNA, 72 bp, Homo sapiens
cacttcggatatgtatttttaatgaagtgcaacaacgttacccagaatcaaaattaagctgtttctacgtaa

SEQ ID NO: 2080 - DNA, 72 bp, Homo sapiens
gacacgaacacacccaccggggaggacaccggccccgcggaaggtgaggataactgggaataccaggcatgt

SEQ ID NO: 2081 - DNA, 72 bp, Homo sapiens
ggatgcggtgcgggagttaatggacctggccttggcgaaggcgcgtcctgggttggatcgaaaccctctcat

SEQ ID NO: 2082 - DNA, 72 bp, Homo sapiens
ataaaggaaacgggcccgaagggaagcgggagctgcgggccttggctgtgagcttggccaggctatttcctg

SEQ ID NO: 2083 - DNA, 72 bp, Homo sapiens
atgtgacagtagaagagagaacaacacacagtgcccggagccaatatgagtgagcagactggacaggaagag

SEQ ID NO: 2084 - DNA, 72 bp, Homo sapiens
tgagcacgccaccccgccctctccctctctgagagcgagatacccggccagacaccctcacctgcggtgccc

SEQ ID NO: 2085 - DNA, 72 bp, Homo sapiens
ctcctcgggcgagctcctggctttgccccagcaagcgggaactcccaggatcaggaaggtcccagagaaact

SEQ ID NO: 2086 - DNA, 72 bp, Homo sapiens
tattctttgttgctgacggcttcctgggtatgcatcggacctgtattgcagcagttctcaaactttttggtc

SEQ ID NO: 2087 - DNA, 72 bp, Homo sapiens
ctttctgtgccaaaggcgcctttaccatgaggaagcggaggcacggagatgctgagtgtcttgctcaagttc

SEQ ID NO: 2088 - DNA, 72 bp, Homo sapiens
ttacactgttggctgccaggccaggaatgtgtaatcgcccctgctgtggtcacagagttgcaggaatgtggg

SEQ ID NO: 2089 - DNA, 72 bp, Homo sapiens
ctgattctcactccacaggcagcagatgtgccttacgggagatagtgcacagtgagcgctcagtgaatatga

SEQ ID NO: 2090 - DNA, 72 bp, Homo sapiens
tttttcaaacccttccccttgtgcaaaattactttcgccagtgaggaattttcagtaatgagctgtctgttt

SEQ ID NO: 2091 - DNA, 72 bp, Homo sapiens
aatttaagttttttttttccaggatcctggtgatgcggcccaacaggaagcaaagcacaggtatgggctgga

SEQ ID NO: 2092 - DNA, 72 bp, Homo sapiens
gttggagaaaaatgggtctgtagagaggacttgtgcgtgcccacatgcacacacatggctgacatcagagtc

SEQ ID NO: 2093 - DNA, 72 bp, Homo sapiens
atgtcaccagccacacagcgtggagctggctctcccgcggccaccacagacctgagcccaggaggctctgtg

SEQ ID NO: 2094 - DNA, 72 bp, Homo sapiens
ctgctagtaatgaaacctaccaggaacgcttggcacgtctagaaggggataaggagtccctcatattgcagg

SEQ ID NO: 2095 - DNA, 72 bp, Homo sapiens
gggagcttgcctcattctattttgtattcccagtacgtgacacatggctggacacaccagaaattgtccgat

SEQ ID NO: 2096 - DNA, 72 bp, Homo sapiens
ggtagcttctattcacctcttggctccagaaacagcgaccctgtatggatgactcagcagggagcagatgag

SEQ ID NO: 2097 - DNA, 72 bp, Homo sapiens
gctgagaggtggccgagagagaggagtcgcagagccgccagagtgagtcaggcacctccactgggattacag

SEQ ID NO: 2098 - DNA, 72 bp, Homo sapiens
agccaggccccagattctcaggccggaacttccaccgctccagggctccctgcactgagggaggccactttg

SEQ ID NO: 2099 - DNA, 72 bp, Homo sapiens
gccctggcccgcgctcgccccccagggcctcatgtcggaaccacagcctgacctggaaccgccccaacatgg

SEQ ID NO: 2100 - DNA, 72 bp, Homo sapiens
gagcacacctccctgacacagaagttgtcaatatgcgcacagctggtggggaggctcaggcgaaggggggac

SEQ ID NO: 2101 - DNA, 72 bp, Homo sapiens
gcaagtgtgaaagccctcagcagagagcgagcctgcgtgggcttgtggggctcctgagcaccccggtgagtg

SEQ ID NO: 2102 - DNA, 72 bp, Homo sapiens
agcaacaagtctcaagtgtttgttgcgcaacaggccgggttttctgtgcttcgtatagatctgttcatctga

SEQ ID NO: 2103 - DNA, 72 bp, Homo sapiens
ctggaaatggccacttgggggtttccctaagcacccgaaactcagtgagcccccaagtgacctcgtctccca

SEQ ID NO: 2104 - DNA, 72 bp, Homo sapiens
gcccagtggcgagacagagacacctgcagggctcccggattgggggcggtgaaaacctgcacggtgcacgcc

SEQ ID NO: 2105 - DNA, 72 bp, Homo sapiens
ttataggtcactcctggggcctcttgggtcccccacgtgacagtgcctgggaatgtattattctgcagcatg

SEQ ID NO: 2106 - DNA, 72 bp, Homo sapiens
ggtgaagcaatcaattgccaggaattctttcagcacggaggttttctctgcaaactcatcctccttttatct

SEQ ID NO: 2107 - DNA, 72 bp, Homo sapiens
aagagttagaggcccctgcatggccaggggctggccgtcttgctgcctgcccactttagggtgtgactgtct

SEQ ID NO: 2108 - DNA, 72 bp, Homo sapiens
gcagtgttggagcaacagcttagagggaaacacttcgagggcagctcaaggctttatcatccttgcctgccc

SEQ ID NO: 2109 - DNA, 72 bp, Homo sapiens
gcgcggcgtgcacggctctggaacctgccaggatgcgctgatgtggcaactcactcagggtggcatcgttcc

SEQ ID NO: 2110 - DNA, 72 bp, Homo sapiens
tgaagtaaaccacatcccaaggtcaacactgggtccgttccccattctggctgggcctgggcttccttactg

SEQ ID NO: 2111 - DNA, 72 bp, Homo sapiens
gggaagctcttttctcatatgcaggagccaccacacggggagctggagcctagctgtgccctccgttccagc

SEQ ID NO: 2112 - DNA, 72 bp, Homo sapiens
ccccagttcctgtcaaaaaagaggagagggctctgcgatgtgagatgtgtggcccatcaggggctctgaggc

SEQ ID NO: 2113 - DNA, 72 bp, Homo sapiens
gagccctcccccttgggatcccgcagctgaccagtcgcgctgacggacagacagacagacaccgcccccagc

SEQ ID NO: 2114 - DNA, 72 bp, Homo sapiens
taaatgactcaactaaaaaaaaaaaagctttaggacgcaaggaggatgagtgtgcaatgtgtacaaaagaga

SEQ ID NO: 2115 - DNA, 72 bp, Homo sapiens
ttcagctatgcctgggttaggaagcctctgtgagccgaagagggagaatgaagatgggatgtcccatgctgg

SEQ ID NO: 2116 - DNA, 72 bp, Homo sapiens
ttggagatgtttgatagaagctgaacccacctcttcgttagtactgtgtgaaattggctgtgatgtgctcgt

SEQ ID NO: 2117 - DNA, 72 bp, Homo sapiens
gcaacccccagtgacacaaccctgccacccggtgacgcaacccccagtgacacaacccccagtgacgcaacc

SEQ ID NO: 2118 - DNA, 72 bp, Homo sapiens
cttgtagctatctcaattcccgtggcatcccaatccgctccaatcaagtcaaagttccttggaaggcagaca

SEQ ID NO: 2119 - DNA, 72 bp, Homo sapiens
ttccttcatttcccccttactcagcttgaacttgtcgccctcttggcaggagtacttgtggaaggtagtgac

SEQ ID NO: 2120 - DNA, 72 bp, Homo sapiens
ggaagtgtgagggaacagcatatgcagaggcatcacgctgtgcttgtcagagaccagaggcagatagagccc

SEQ ID NO: 2121 - DNA, 72 bp, Homo sapiens
gtatggccatatgactcctggggccacctccacgacggcccagccccaccgacgctctgctgaaaatcctgc

SEQ ID NO: 2122 - DNA, 72 bp, Homo sapiens
caggtggctgagaggatgggggcccaggagcacagcgaaggcaggaaatggggaaatggcaactgcccagcc

SEQ ID NO: 2123 - DNA, 72 bp, Homo sapiens
cggcagaaccctgcaaggtgtggggcagtgaggaacggtggcagagcttgaatgtggaagactgaggaactg

SEQ ID NO: 2124 - DNA, 72 bp, Homo sapiens
cctggggtaacctgggaagtcagacctgcccagctcggagactagctgccccctcaccctcccctgtctgag

SEQ ID NO: 2125 - DNA, 72 bp, Homo sapiens
cttggaggcggcggcacagacatgggtctcagtgccggacgctaaccccacatgtggaggccccgtgagccc

SEQ ID NO: 2126 - DNA, 72 bp, Homo sapiens
tcctggcctaatatgtgacgtgctacaaatgccatcgagtgccattgagcacccatgcaggctggatgcacc

SEQ ID NO: 2127 - DNA, 72 bp, Homo sapiens
ctgtggttgggctggggtggactccccacctgcgtcgtccaaacattagtgtgagtgcacccacacaaacac

SEQ ID NO: 2128 - DNA, 72 bp, Homo sapiens
taatccctaaatttcacaatgtgttgttctgtgggcgcagagagaagttcttcattggtggtggtggtgaga

SEQ ID NO: 2129 - DNA, 72 bp, Homo sapiens
accagcaaattttaaagaagtggagctaagagagacgagtatagtaataacaagtctgaaaaactgcaagag

SEQ ID NO: 2130 - DNA, 72 bp, Homo sapiens
ccgctcccatcctcgagtcccgcacactgcccggccgagcactcagctgtcgggctctgccagccacgcgga

SEQ ID NO: 2131 - DNA, 72 bp, Homo sapiens
aaatctagagtgggagcctcaggccagtaggctgacgccctgaacagtgtcccagagcaggaagaggaagtc

SEQ ID NO: 2132 - DNA, 72 bp, Homo sapiens
gccagctcaggctcactgtcctttgaactggtacccgataaacagaggctccaagacgctggcagccttgtt

SEQ ID NO: 2133 - DNA, 72 bp, Homo sapiens
gcagccgccgcagcagcagagcccccagctcacgacggtcacggccccaaggcctggtgccctgctgacggg

SEQ ID NO: 2134 - DNA, 72 bp, Homo sapiens
gacatcgccagcttgtttccctgggcaactgactccgaggggtgagcaaatccctcagagaaatgctcctga

SEQ ID NO: 2135 - DNA, 72 bp, Homo sapiens
tcatgacaattctatgagatgggcacttatcgccccgtttcacagacaggggatgcagagggtacagaaagg

SEQ ID NO: 2136 - DNA, 72 bp, Homo sapiens
ataattctactatgatcaggtcatttttgtttcttcggttggaaaggcagggcaggatatgttgtaatgctg

SEQ ID NO: 2137 - DNA, 72 bp, Homo sapiens
gagtacagctgggtcaggccaggctgcctcagccccgggcgttaggaaaccaccggccccgctgagtcaccg

SEQ ID NO: 2138 - DNA, 72 bp, Homo sapiens
acattcagggatattgacttctggctctttctccacgtgactatgagatgaagcaatttctgaagagggtta

SEQ ID NO: 2139 - DNA, 72 bp, Homo sapiens
tcctcctcttcctgttccattcagagacgatctgccgaccctctgggagaaaatccagcaagatgcaagcct

SEQ ID NO: 2140 - DNA, 72 bp, Homo sapiens
cagcaactatctattctcccaggaggccatacaagcgaggggccctgaagcttaacatttattaacttcatg

SEQ ID NO: 2141 - DNA, 72 bp, Homo sapiens
tcccacaagcacccaccctgtcctcagccctcatccggctccccactgacagccctcaggaagcgagcagca

SEQ ID NO: 2142 - DNA, 72 bp, Homo sapiens
gcggctgctgggcgggccagggagcaaggaggggccgccccgagggaaccatgctgccttccaggctgacgt

SEQ ID NO: 2143 - DNA, 72 bp, Homo sapiens
cagttgaatcaaggcctccctcagggccaggggcccggctgtggtcagtgtggcccacgcgtgaggcctgga

SEQ ID NO: 2144 - DNA, 72 bp, Homo sapiens
ctggccatcttgcctcatctgtgttttctcctttgcgttgctcaaccactaagccaatgtcacatactttag

SEQ ID NO: 2145 - DNA, 72 bp, Homo sapiens
tggaagagtaacgtgaatgctcctgggtgggcagacgcaggggtgggtatggatcactgtctgtcactgccc

SEQ ID NO: 2146 - DNA, 72 bp, Homo sapiens
gagaggtgcctaccctctgaccagcaaatgtcctccgaggaaacggagaaatgggtcttgagaggctttgga

SEQ ID NO: 2147 - DNA, 72 bp, Homo sapiens
caaaaaaatacgaaaaccagtcaggtgtggcggcgcgcgcctgcaatcccaggcactcggcaggctgaggca

SEQ ID NO: 2148 - DNA, 72 bp, Homo sapiens
acattccatttgcagcttcctgctaagtcagacggcgatattgggcaacagcaaatcaaacttgacccaagt

SEQ ID NO: 2149 - DNA, 72 bp, Homo sapiens
atgaagacagaaagaatctcctggtctgtgctcggcggtccaggaaaggtcttgaaaggaaaagtctttgat

SEQ ID NO: 2150 - DNA, 72 bp, Homo sapiens
agtcagcctgagcagcccagccccccagtcccagacgttacctcatctcccaggcctgggcccacagccagc

SEQ ID NO: 2151 - DNA, 72 bp, Homo sapiens
attccactgatgatttccaggaactaccaaagccacggatcagctgagttacccgggctaatagcaggagga

SEQ ID NO: 2152 - DNA, 72 bp, Homo sapiens
aacgtctccagggcaatgtgggcaatctcagcctccgtcttccccaggaacatctgacaggcggccgccaac

SEQ ID NO: 2153 - DNA, 72 bp, Homo sapiens
ctcaagctgccgggaagcacagccccaagttggcacgactcccgagtggcccaccaggcccggctgcgggtg

SEQ ID NO: 2154 - DNA, 72 bp, Homo sapiens
ggcaaaacctagtcgagggggacgcccttgtctcccgtcacacttaccattttcctccggcccaacagtgac

SEQ ID NO: 2155 - DNA, 72 bp, Homo sapiens
tcctctggagtctggctgcgctagccaaaacatcccgctcagcacatatttcacaagcaactgaccagttcc

SEQ ID NO: 2156 - DNA, 72 bp, Homo sapiens
gcagcaacacggctggtgccacggcccggggaaggcgtgcggctgcagcagctcccagcaatgtcaggggaa

SEQ ID NO: 2157 - DNA, 72 bp, Homo sapiens
aggcttgcagccctctcactgcagacgtgggaacacgactctgtttaaaacccttcaaagcccgccttcttg

SEQ ID NO: 2158 - DNA, 72 bp, Homo sapiens
cttggagattgcaatgcgagttgggtaatgcagctcggtggttttgtgttctgccactctattaagagaggg

SEQ ID NO: 2159 - DNA, 72 bp, Homo sapiens
ggccagctcagaagaggaaattctgaaaggggatccgtctttgtcatattccctgaatcaagtgtttctggc

SEQ ID NO: 2160 - DNA, 72 bp, Homo sapiens
gctcccagccagagctgaggcttttggtaaacacacgcatctgttcaggcctgacctgttttcctaatcttc

SEQ ID NO: 2161 - DNA, 72 bp, Homo sapiens
atggagatggtcaccagggagtgtccaggtcagaccgccacagaagagtgcagcctcctggccttcagaccc

SEQ ID NO: 2162 - DNA, 72 bp, Homo sapiens
ttgagtaaatgcatgtgcacggtcaggtcagaccccgggatcgggtgaaactccgttcacatttgcatacag

SEQ ID NO: 2163 - DNA, 72 bp, Homo sapiens
gcttgcccggcctggagggcaggcccggtgagcaccgggcccagcacctcccactccagagactgcaagaca

SEQ ID NO: 2164 - DNA, 72 bp, Homo sapiens
aagaaacactatgccttggtaaaaacaaaacacaacgaaaaggctagaagagtttaataaggacagtgtgga

SEQ ID NO: 2165 - DNA, 72 bp, Homo sapiens
tccactgccgtacagagttccacggcgagctgggccgggctttatgaaagcagttctctcagatgtccaggg

SEQ ID NO: 2166 - DNA, 72 bp, Homo sapiens
gttgctgttgccaggactggcagggaaacctgggtcgcctggatttgctggttgcagagcaaaatcaaatac

SEQ ID NO: 2167 - DNA, 72 bp, Homo sapiens
gggcgttgagactcagaggacaccgggctcccccacgtggctcctgacgtcctgtgacaatttcattcccct

SEQ ID NO: 2168 - DNA, 72 bp, Homo sapiens
ggttgttgcagagttacatcattgcgaaagagatccgaggggccccaaagcttaaaatagtccctatctagt

SEQ ID NO: 2169 - DNA, 72 bp, Homo sapiens
cggagatgtgcagtggagcgagaacttcctgtgaccgtgacattgtctaggtggtgagcaggtgtgggggtg

SEQ ID NO: 2170 - DNA, 72 bp, Homo sapiens
ggtcatgatgaaaccatcctacttctgttgaacctcgtcccaggcaggatcggggcctgcggcctacagcct

SEQ ID NO: 2171 - DNA, 72 bp, Homo sapiens
ttgccacgtgagggagtctctggagaccaccaacccgctggtgggcggccaagcgtcaccaccagtccctct

SEQ ID NO: 2172 - DNA, 72 bp, Homo sapiens
gggtagacacgcatgaaagccggtgtgaaatgcagcgccctggattgaacatcagagacggagcccacagga

SEQ ID NO: 2173 - DNA, 72 bp, Homo sapiens
tgagggcagagacttctgtctgttgggttcactgccgcattcctgggacccgagcggtgcctggcacgcagg

SEQ ID NO: 2174 - DNA, 72 bp, Homo sapiens
caggcaacagagcaagggcattgaaaacatgaattcggcttcaatgaatttatctggaatggtgcaatcgga

SEQ ID NO: 2175 - DNA, 72 bp, Homo sapiens
ctgggtggcgcaggtgggagaagagtctgagagcccggggagacttcagggccagaggctcgcccagcccca

SEQ ID NO: 2176 - DNA, 72 bp, Homo sapiens
ggaagtcagccccacctctgagcttttcagttatacgagccgatgaagtctctttttgcttaagcctctttg

SEQ ID NO: 2177 - DNA, 72 bp, Homo sapiens
ggcaattttgcttctcagcagacattgaggaatgtcggagacatttatggttatcatagcgaggtggcaggt

SEQ ID NO: 2178 - DNA, 72 bp, Homo sapiens
ccggatccaccaattccccgcttccctaaggatgacgggtaaatctggtgagacccgctgccctcctaatgt

SEQ ID NO: 2179 - DNA, 72 bp, Homo sapiens
ctccacaggctgggtggcccggaggctgggctgggcgagtatctcttcgaaaggctcactctcaagcacgac

SEQ ID NO: 2180 - DNA, 72 bp, Homo sapiens
ctttcttcagggtccccaatttctctctcttccctcgtttctgtctgtgttctctgccattaagggcagctt

SEQ ID NO: 2181 - DNA, 72 bp, Homo sapiens
acgtgcttaatcacctaataagacacacacacactcgcacacaaatcacacacacacatacacacacacaca

SEQ ID NO: 2182 - DNA, 72 bp, Homo sapiens
gaacactgtactccaccacagaaaaaccaatctgacggcaaagccaggccacctcctcctaacccctccctc

SEQ ID NO: 2183 - DNA, 72 bp, Homo sapiens
cctaaacttgaactcctgtctgtgcagcctccagccggccaggcgctaaataaggccacggcccgtttcctc

SEQ ID NO: 2184 - DNA, 72 bp, Homo sapiens
ccttgtacctgagagtgacagcagcacgttgttcacgcagtagagccaggagcagcgatgtgaaatcagctg

SEQ ID NO: 2185 - DNA, 72 bp, Homo sapiens
tgtgatgctgcctgggccagcagggcaggtcaccacgctgtctcttcaaagcagctcgctcatgcccacagc

SEQ ID NO: 2186 - DNA, 72 bp, Homo sapiens
agcagcaaagcagagcatggttaatcacttcaaagcgtttcccaaagacacagagcaggtacccaaacaggc

SEQ ID NO: 2187 - DNA, 72 bp, Homo sapiens
tcagttggctgaacaaggcaagcccctcagaggcccggggctgaggtctctgttgagcccaggatgaggcct

SEQ ID NO: 2188 - DNA, 72 bp, Homo sapiens
atggctcttcttgaaacaggtttagtgtttctactcgagttccttctctgtcgttcaacacaaacacataca

SEQ ID NO: 2189 - DNA, 72 bp, Homo sapiens
aaatacagtgaaatttagagggagccctccttccccgaaaggaggaagcaaacactctgggtgctgttgctt

SEQ ID NO: 2190 - DNA, 72 bp, Homo sapiens
tgcgtactaagacctgtgttcagcagcggcggcggcggcggcggtgggctcggaggctcacagccagtggac

SEQ ID NO: 2191 - DNA, 72 bp, Homo sapiens
cttgccaggctgtggtgaggtcacatggctctgtgcgtaaaaggtacacagtgcaaacgtgctggaatgtca

SEQ ID NO: 2192 - DNA, 72 bp, Homo sapiens
gcggaattaatccatgcacgagagacctagcctcacgttgacggagtttgtgcaaaatcaatagtcatgcat

SEQ ID NO: 2193 - DNA, 72 bp, Homo sapiens
caagcagctgcgaggccctcgggcagtggcatgggcgccgtcgcttcctgctaaccccacatcctcatttcc

SEQ ID NO: 2194 - DNA, 72 bp, Homo sapiens
ccctgggacccagggaccatcccgttgttgacctccggggtcaggggtgcggatgggggccggcccttcccg

SEQ ID NO: 2195 - DNA, 72 bp, Homo sapiens
gggccccagtgcacttgtaaagtggagagacctgacgaccccccacccccaagcgctccactcacgctgttg

SEQ ID NO: 2196 - DNA, 72 bp, Homo sapiens
agattttttatgggataaaaaatagtaagtttgaacgctgacaggaaggatcaaagagagagaagaaattga

SEQ ID NO: 2197 - DNA, 72 bp, Homo sapiens
agtttgtgcaacattccctgtctttgtctgtgttacggccctggcctcccagaattgtgggtgattcagggg

SEQ ID NO: 2198 - DNA, 72 bp, Homo sapiens
gcctgagacggttacaacatggtgagcctgtggcacggtgagcccaagacagggttacgacatagtgagccc

SEQ ID NO: 2199 - DNA, 72 bp, Homo sapiens
cagcaaagagacaagacatccccaccagggacagccgagccagctgagccagagggggcaaaagaccacagg

SEQ ID NO: 2200 - DNA, 72 bp, Homo sapiens
actcttacagactacactgcagtataactatattacgtaatgttattatctgattacctctttaagaccata

SEQ ID NO: 2201 - DNA, 72 bp, Homo sapiens
ggctcttgaactcatgaacctaagtcttctgctcacgaggtgactagttagccaccagccatagtggcaaat

SEQ ID NO: 2202 - DNA, 72 bp, Homo sapiens
aacatggattaaagatgggctgctgtttgtgttttcggacctgcatgattgtgcaatggcaacagttgtttc

SEQ ID NO: 2203 - DNA, 72 bp, Homo sapiens
ctccacaggggacagattttcccctgcaactttcacgtgtctcaagcagggtctcaagactactccctattc

SEQ ID NO: 2204 - DNA, 72 bp, Homo sapiens
cactggagaaatccaagaggggaagtccacaagggcggtggctccctacaaggtcacagagcaagctggtgt

SEQ ID NO: 2205 - DNA, 72 bp, Homo sapiens
ggtaggcggtagtcaaggccctttggtgaagcaagcgattgtctccagcgttgtcagcttcgctcctccata

SEQ ID NO: 2206 - DNA, 72 bp, Homo sapiens
aagtttgcttctctctcattaatctgctcagttcacgaccttctcccctggggctcactctcaggcacatgc

SEQ ID NO: 2207 - DNA, 72 bp, Homo sapiens
acttacctggttgtacagtcgggcaccatcatctccgtccttgtgaggcctggagcctaggcagtggtctct

SEQ ID NO: 2208 - DNA, 72 bp, Homo sapiens
caagacaggcctgcgggctcctggcacagggccaacgcttcacacttgcctggaatctgagtatttgtccta

SEQ ID NO: 2209 - DNA, 72 bp, Homo sapiens
tgggaacatgctgattgtggcaacaatgacactgccgccatttgagacattctagatatgcagactgaggaa

SEQ ID NO: 2210 - DNA, 72 bp, Homo sapiens
aagcccattctgttcacaggaagactgcaaggtgccgagtcacactgttcactggtttattgagattcgggg

SEQ ID NO: 2211 - DNA, 72 bp, Homo sapiens
atgggtggtgggtaagaagctggggcccatccacacggtggaataggattcagcctggaaaaggaaggactt

SEQ ID NO: 2212 - DNA, 72 bp, Homo sapiens
agatcgccgccaacatccaggctgactacttgtatcggtgacgccccaccggcccgcagcccctgctgccca

SEQ ID NO: 2213 - DNA, 72 bp, Homo sapiens
ctatgacacacacttgctgaatactgactactcctcgttctatggtgtctttcttgagtactgctttatatc

SEQ ID NO: 2214 - DNA, 72 bp, Homo sapiens
gattgcagcttccgtgggatttcccactgctctgacgtgagctcgcaggggtgggagcagccaggcaactcg

SEQ ID NO: 2215 - DNA, 72 bp, Homo sapiens
cagctcaatctttacttcctctaggaaggccccaccgaccagccactccaccaagctaaacaatcctccacg

SEQ ID NO: 2216 - DNA, 72 bp, Homo sapiens
ccagaaagccacaaggagctggatgaagaaagggacgatggtttgccaaagatgatgtaaggacccagactg

SEQ ID NO: 2217 - DNA, 72 bp, Homo sapiens
aatggatgattctgcagcccaagttcttcccactacgctctactattacaaaactgttatccctctgtctgg

SEQ ID NO: 2218 - DNA, 72 bp, Homo sapiens
aatgcagatgtgattagcacactggtcagtcagcccgcaaaacactttcaccaagtcctctaaagtgttgca

SEQ ID NO: 2219 - DNA, 72 bp, Homo sapiens
gggccccagtctggggtttggctcacctgtgcctccgaaaaccaccaccagtttcttgtccaccatgaggac

SEQ ID NO: 2220 - DNA, 72 bp, Homo sapiens
aagtcatcatctgtcataagctcttaatcatactacgttcccttgcataatattcacaagatcctacttttg

SEQ ID NO: 2221 - DNA, 72 bp, Homo sapiens
aatcccatcatctcttattatgggtaattaagatgcgcaggaggggatattttggagcagtgtggtccaact

SEQ ID NO: 2222 - DNA, 72 bp, Homo sapiens
aagccatcaactcctgagattttcagtttacacgacgatgctattgcaacacatttctttttctgttcaagg

SEQ ID NO: 2223 - DNA, 72 bp, Homo sapiens
gcctaggcccctccctctaggagcagctgtcagcacggactacataggggcctccaaagtactgagaggagc

SEQ ID NO: 2224 - DNA, 72 bp, Homo sapiens
tcacacagacaggaacctgaccccaggcggccctgcgcctcacagagtgcacaatcctctgcagaggtggga

SEQ ID NO: 2225 - DNA, 72 bp, Homo sapiens
tgtaggcaaggctctaggtaaggacatagaaaagacggcttacctggtttgagtgccagctaggctgcttag

SEQ ID NO: 2226 - DNA, 72 bp, Homo sapiens
tggggcatcctgtgttctggagtctgggcgctgggcgggaacctgggagctttctccagtggagctgaggcc

SEQ ID NO: 2227 - DNA, 72 bp, Homo sapiens
caggtttcgggttggggtgaactactggggaggagcgccccagggcttctctcagatggaggagggacaggt

SEQ ID NO: 2228 - DNA, 72 bp, Homo sapiens
tatccgtgagggattggttggttccaggacacctgcggatcccaaaatctgcggataatcaagtccctgtta

SEQ ID NO: 2229 - DNA, 72 bp, Homo sapiens
cctattggccgaggcactcgccaatcctggtgaagcggccccgtgagttggccctggttggtggagccggca

SEQ ID NO: 2230 - DNA, 72 bp, Homo sapiens
attgcgtaggcactctcctgagtaggtgaagcgtgcggctggagaaagaaaaggaagaacaaggctctgaca

SEQ ID NO: 2231 - DNA, 72 bp, Homo sapiens
tgctgcagacagctcattgggttccactggcttttcgtagccatagcaacaaccaacagacagacttagcaa

SEQ ID NO: 2232 - DNA, 72 bp, Homo sapiens
ccatgggacatgagtagccgaccatgacctggctgcgtactggcccaccaagcattcgactggcgtgcccag

SEQ ID NO: 2233 - DNA, 72 bp, Homo sapiens
ccaggctggcattaagcccacaggggcctcgtgctcgggaaagtctggtctgttcaatcaaaggcccaaccc

SEQ ID NO: 2234 - DNA, 72 bp, Homo sapiens
aggttggtgcagccccttgggatgagattggcagtcggccagaggatgaacatagatatttcaggcagaagg

SEQ ID NO: 2235 - DNA, 72 bp, Homo sapiens
tcaaatgagaagcaaacagttcacttccttggatccgtggtttcgcctgtggccttcagggggcgacgttgc

SEQ ID NO: 2236 - DNA, 72 bp, Homo sapiens
ggagggctcactccatgccagacccccacagtttacgagggctcagtggtttgccatccagcacatcagtct

SEQ ID NO: 2237 - DNA, 72 bp, Homo sapiens
atacacatcagttcctgtggttctgtacagagcagcggctgaccccacccccacaggacacaatgtggggag

SEQ ID NO: 2238 - DNA, 72 bp, Homo sapiens
gaacaagtgttagataggaaatctcacatcccttccggaagtcaccaacacagtgtgggagggacacgttgg

SEQ ID NO: 2239 - DNA, 72 bp, Homo sapiens
ttgttccatcacctttcaagttcattttctgtttccgtatgtttatttctcagaacaaattgtctttgacga

SEQ ID NO: 2240 - DNA, 72 bp, Homo sapiens
cccatatccccctgcccaggttaaccactgggttccgtgttgtgctgtggaagcccatggcccagagaccca

SEQ ID NO: 2241 - DNA, 72 bp, Homo sapiens
ctttttgaagattccttgattttcttttctgcaaccgacctccattctcttttatccaagggcaccaatgag

SEQ ID NO: 2242 - DNA, 72 bp, Homo sapiens
gattgcaccactgtactccagcctgggtaacagagcgagactccatctcaaaagagaatagagaagttgaaa

SEQ ID NO: 2243 - DNA, 72 bp, Homo sapiens
gagtcctggagcttcctggggctgtgggggtggggcggggctgggggacgcagtctcacggtcgggtgcaga

SEQ ID NO: 2244 - DNA, 72 bp, Homo sapiens
catagtggaaccccatgtccaccaactcatgacaccgcatgtggtgtttattaatctacttgtaaaggctgg

SEQ ID NO: 2245 - DNA, 72 bp, Homo sapiens
gcagaggcacagctgggatcacagctactgtttgacggcacattctgcaccttgaatgtggcctggggttac

SEQ ID NO: 2246 - DNA, 72 bp, Homo sapiens
ggcgcccattctccaagttactagggtggcgcaagcgcctctccctttaactgcccaggcagccccgcctgc

SEQ ID NO: 2247 - DNA, 72 bp, Homo sapiens
tgtgcaacacactgtgcatgggtggggagggtgtccgaatgcaaagacaccaaagcgaaggagagctaccca

SEQ ID NO: 2248 - DNA, 72 bp, Homo sapiens
aaagtcataatccttgaattatagccaggtccacccgatgcttagctcttttcctacttccccaaagtagga

SEQ ID NO: 2249 - DNA, 72 bp, Homo sapiens
ttccacattgtatctaattttccagttcctctttacgtggcttctgtctccagcaggataacctgcttcctt

SEQ ID NO: 2250 - DNA, 72 bp, Homo sapiens
ttagtcattccttcttctgtacaacagctacacagcgtacctgctttcatcaccatattgactgcatgcttc

SEQ ID NO: 2251 - DNA, 72 bp, Homo sapiens
attcttaagagcaagaggccaggtgtggtggctcacgcctgtaatcccagcactttgggaggctaaggcggg

SEQ ID NO: 2252 - DNA, 72 bp, Homo sapiens
cccctggttgagaacaattggtttccatagtaattcgcccagcttctgtggaagaaacttcaaaagcccttc

SEQ ID NO: 2253 - DNA, 72 bp, Homo sapiens
aataccttcagcagtatttttagctacagtaaaaacggaaggagctgggaatgatggtgtacccgtggttga

SEQ ID NO: 2254 - DNA, 72 bp, Homo sapiens
tgatgcccatcttggcctggggcactgagatcgcccggagatcacagtgttagcttcagggcggggtagaaa

SEQ ID NO: 2255 - DNA, 72 bp, Homo sapiens
atgaatgggggtctctccaacaaagcagtctagaacgggcccctgaggtttgaattcaggccttaggaatgc

SEQ ID NO: 2256 - DNA, 72 bp, Homo sapiens
gtggggacctgggccaggcaggcactccgcaaaggcgagttccagagcccacaggtgcccgagctgcccttg

SEQ ID NO: 2257 - DNA, 72 bp, Homo sapiens
agaaagaggaagacgaagaagaaaagaagaagagacggagatgtttgtatttttgtagtccaagttcttaca

SEQ ID NO: 2258 - DNA, 72 bp, Homo sapiens
ctccaacaaccgcaattgctctccctcttgctgcccgttaggacaggccttgaggagaaaagagaaccctga

SEQ ID NO: 2259 - DNA, 72 bp, Homo sapiens
aggaagcacatgtgggcgctggtctggacgtgcagcggcctcctcctcctgagctgcagcatctgcttgttc

SEQ ID NO: 2260 - DNA, 72 bp, Homo sapiens
caaagtgagggtagtaattccaatcttgggagggacgattaattgcatgtgaaatgcccaccacagagcctg

SEQ ID NO: 2261 - DNA, 72 bp, Homo sapiens
taaaaaacccacattgattatctgacatttgaatgcgattgtgcatcctgaattttgtctggaggccccacc

SEQ ID NO: 2262 - DNA, 72 bp, Homo sapiens
tttgttcagggagggctcaaaccccccaccgcgcgcgcctttcccatgcacacctccacccgccccgggccc

SEQ ID NO: 2263 - DNA, 72 bp, Homo sapiens
gcttcctcagtaccttggtccagctcttcctgcaacggcccaggagctcagagctccacatctgaccttcta

SEQ ID NO: 2264 - DNA, 72 bp, Homo sapiens
atgatgaggcaagaaggcatgcttcctccaagactcgggactggggtggaaagcaagactttgccttgaaag

SEQ ID NO: 2265 - DNA, 72 bp, Homo sapiens
ttaaagacaaagcaaaaccagtgaggctgaaagaacggctgccctggtgcacacagatggcacatggcagag

SEQ ID NO: 2266 - DNA, 72 bp, Homo sapiens
cctctgtggagacagccatccggggccgaggcagccgcccaccgcagggcctgcctatctgcagccagccca

SEQ ID NO: 2267 - DNA, 72 bp, Homo sapiens
cccgctctttgtcatgtgtctctgtgtggagtccccgttagtgcctcagggtgggccccataccttgcatct

SEQ ID NO: 2268 - DNA, 72 bp, Homo sapiens
agcgattaggaaactgccccattgaacgccttcctcgctaatttgaactaattgtataaaaacaccaaacct

SEQ ID NO: 2269 - DNA, 72 bp, Homo sapiens
agccttttttttttttttttccctctgtgggccagcgagggtttcattttaggaaatggaagtgtcaatgtg

SEQ ID NO: 2270 - DNA, 72 bp, Homo sapiens
caaaaacctgtatgcaatctgggcatggtggctcacgcccgtaacccaagcactttgggaggccaaggtggg

SEQ ID NO: 2271 - DNA, 72 bp, Homo sapiens
caataggttctgggaaaccgtgaccttaagcgaaacgacgtataaggaaaccagtttgtttaaaggactgtt

SEQ ID NO: 2272 - DNA, 72 bp, Homo sapiens
acacagatgattgttcttttttttagtttgagacccggtctcgcagtgccgcccaggctggagtgcagtggt

SEQ ID NO: 2273 - DNA, 72 bp, Homo sapiens
gtctcttagatttccctcttgtatttgcatgcaggcgagcatagcaaattgactgggggaagggaagaggtt

SEQ ID NO: 2274 - DNA, 72 bp, Homo sapiens
ggagacccggggctggctgtgcgccgacaggcaagcgcatctgctaccctagagccggccacctgggtcccc

SEQ ID NO: 2275 - DNA, 72 bp, Homo sapiens
cctccaggacggctgctgaaaacataccagccaggcggcatgcagggacccaggcctggcatcctacccgat

SEQ ID NO: 2276 - DNA, 72 bp, Homo sapiens
aagtagttacagaagacccacagtgcccctagactcgaagatttttagtctcaacctattgaggagggaatg

SEQ ID NO: 2277 - DNA, 72 bp, Homo sapiens
cagcactgcctggggcccgaggcccggtggccccgcggtttctcgcgccaccaccccggggactgacacagc

SEQ ID NO: 2278 - DNA, 72 bp, Homo sapiens
ccactcccggccaagccctggagtgaagaaatctccgggacttccagtaattgccgtccagccacacgcagg

SEQ ID NO: 2279 - DNA, 72 bp, Homo sapiens
cctacagccctgtgatgcttcagacatggtactctcgcaaattatttatgcactgatgaccagctagcttca

SEQ ID NO: 2280 - DNA, 72 bp, Homo sapiens
ctgtgctcagcaagctgaactgcttcttgggtgtgcgactagggtgccagccaggccagggacgtccaggac

SEQ ID NO: 2281 - DNA, 72 bp, Homo sapiens
tggatgctgccttactttgaattgcttcattcacccgctttgcaggccacattcagcaggggatgaacattt

SEQ ID NO: 2282 - DNA, 72 bp, Homo sapiens
aagagtgcgggacaccaggaaccaagcaaagaaagcgtgtgagggaggaagatgcaaaagtgtacaatcaga

SEQ ID NO: 2283 - DNA, 72 bp, Homo sapiens
caaggcagttctaccacttgtggctgctccttcctcgtccctagcccagtgtgcctgcaggagcaggtgtga

SEQ ID NO: 2284 - DNA, 72 bp, Homo sapiens
cctggtgtccggcctgcgccggagctggagggcggcgaggctgtgccaaaccccgcggcccctcagggagcc

SEQ ID NO: 2285 - DNA, 72 bp, Homo sapiens
tgtggccttacgcctgcgcagaggggagacgcgagcgccgcgtggacgctgacctcggtccgcgcctgcgcc

SEQ ID NO: 2286 - DNA, 72 bp, Homo sapiens
tccaaatggctttgcagtactcattcaacatttaccgagcaatttcagttttcagtttgcagagaactgaac

SEQ ID NO: 2287 - DNA, 72 bp, Homo sapiens
ggaggggctgagcacctgctcccaggctggcctcccgggtcccagccacagggttacgtaactgggctggcc

SEQ ID NO: 2288 - DNA, 72 bp, Homo sapiens
aagttgagtcacggctggttgcgcagcaaaagccccgcagtgtggagaaagcctaaacgtggtttgggtggt

SEQ ID NO: 2289 - DNA, 72 bp, Homo sapiens
tagaaagtttattttgacaaggttgaggatacacccgtaacacagcttcaggaagtactgtggtcaaggcac

SEQ ID NO: 2290 - DNA, 72 bp, Homo sapiens
gggatttccaaaccctagaggaaaaaaaacagaaacggttagctacactcagagcgaagagaaggctggtgt

SEQ ID NO: 2291 - DNA, 72 bp, Homo sapiens
caccaggccctgggaggtcctcactgggcgggttccggggcagcaaccatttgtccagcaccagataggtat

SEQ ID NO: 2292 - DNA, 72 bp, Homo sapiens
taatgcattcaggttaaaagaaagggcaaataccacgaatggtttccaaaacctcggttaggtccttcctaa

SEQ ID NO: 2293 - DNA, 72 bp, Homo sapiens
agagtgtctggctgcctccacggggtggccggggacgaggtgcgggcattaaacattaacagtgccaggtaa

SEQ ID NO: 2294 - DNA, 72 bp, Homo sapiens
catgtgacctgtgaagtaatccttcaccaagagcacgtgccaaagctggtcaatattgggccagaaattctc

SEQ ID NO: 2295 - DNA, 72 bp, Homo sapiens
cctgccctgggaccaaggatttgagaatgagggcacgagtcggggtgctacttccttccttgttcatatcac

SEQ ID NO: 2296 - DNA, 72 bp, Homo sapiens
tcaagcctcccctttatcccagcatccaggaagctcggagctcaagttcagtcactgtggcaaatggcagcg

SEQ ID NO: 2297 - DNA, 72 bp, Homo sapiens
ggagtctgtcccttgcagacccctgacccaatgaccggtgaataaagtacgctgacacacagatattctgag

SEQ ID NO: 2298 - DNA, 72 bp, Homo sapiens
cgggccaccggccattccagtgccatctgtgcgatcgtgccttctcgcgctccgatcacctggcgctgcaca

SEQ ID NO: 2299 - DNA, 72 bp, Homo sapiens
cgggagggcggacggggacccctgtctccttctagcggcgaggaatgagcctgggggagccccaccgggcaa

SEQ ID NO: 2300 - DNA, 72 bp, Homo sapiens
cgaaattagcacttaaggagttaaaatgactaccacgttcctcttgcaacaacagtattttcacatggataa

SEQ ID NO: 2301 - DNA, 72 bp, Homo sapiens
tttgggggcatcgccatgctgtcctccacagtggccgctctcttttgcatttccagcagctgtgcaccgggt

SEQ ID NO: 2302 - DNA, 72 bp, Homo sapiens
ggctttgttacaggaacccaagtcaccatcctccccggtcctgtggcaggaagcggtgctaggcgcagctgg

SEQ ID NO: 2303 - DNA, 72 bp, Homo sapiens
gtctccccagagggaccctcctgagctgagctgcccggggcacctgtccctggatgtgaactgccttggttg

SEQ ID NO: 2304 - DNA, 72 bp, Homo sapiens
cattaaaactataaattcaatttttcccagaataacggggctttctgtggcagggccagcaggtttcatatc

SEQ ID NO: 2305 - DNA, 72 bp, Homo sapiens
tgcttggagcttggcaccccctgagaaccacactccgttgacctctgggaaatggaggctggtgattctccc

SEQ ID NO: 2306 - DNA, 72 bp, Homo sapiens
ctgaaatgacattgtttgagggacagtgggtggaacgtgtgagctcctcactgaaggctgcctccagaattc

SEQ ID NO: 2307 - DNA, 72 bp, Homo sapiens
gccggaggaaatggtctcatcattactacgttatacgcagtctgagagtctgcgtggatttttatttcacaa

SEQ ID NO: 2308 - DNA, 72 bp, Homo sapiens
ctttagttctcatttccacctgccttctcaggaaccgcacattgctgatcagtacatggtttctttcttcct

SEQ ID NO: 2309 - DNA, 72 bp, Homo sapiens
ccaattcctctacagaacagcgtgagatgctgcaccgcccgggagggagcctggattctgtttttcttttct

SEQ ID NO: 2310 - DNA, 72 bp, Homo sapiens
tgtgcagagctgttgctgccacatctgtgtgcaaccggcagggacggcaagagagaaaggccagggtggcta

SEQ ID NO: 2311 - DNA, 72 bp, Homo sapiens
tgtggccaaccctgcaacctcagtggcttctgtcacggaaggcaagccccacatcccagaggcatccagact

SEQ ID NO: 2312 - DNA, 72 bp, Homo sapiens
ggaccctggtggctgctgggacatggcaggttccacgacagggaaggatgcagacacactgccctgtgtttc

SEQ ID NO: 2313 - DNA, 72 bp, Homo sapiens
tttttgttttctttgatgcctttggaagagatgagcgccaggcatagtggtgctgcttggctgaccagctgt

SEQ ID NO: 2314 - DNA, 72 bp, Homo sapiens
gcctgtggccccttctcagaaggacgttttaaacgcgtgaggtctgatgcacagccacagggagacacagac

SEQ ID NO: 2315 - DNA, 72 bp, Homo sapiens
agcctctcccaactaagtctcctcactagtctccacgacttcaaatccctgattccacagcctcccgctcct

SEQ ID NO: 2316 - DNA, 72 bp, Homo sapiens
tcagccagcgcctcaattgcccatgttgtacttgtcgctcctttgccttcaccttgacacagaaaaactggt

SEQ ID NO: 2317 - DNA, 72 bp, Homo sapiens
agttagcgtcggcgtgccgcctgccacagcactgccgcctgcgtggcaccgacgccttcgcttctgcatttt

SEQ ID NO: 2318 - DNA, 72 bp, Homo sapiens
ctgactagggtcatagttaccagaacaaactgcaccgccctaccacctcaagaaaccaactccccctacacc

SEQ ID NO: 2319 - DNA, 72 bp, Homo sapiens
cagcttcagcctacttcctccttcctttatgctgtcgagttcctctagctcttgccctctgctggcaggggc

SEQ ID NO: 2320 - DNA, 72 bp, Homo sapiens
tggaaagcacattccaaaaacactagctttgttttcgcaatcagaaagccaattcctgtcactagaaaaaac

SEQ ID NO: 2321 - DNA, 72 bp, Homo sapiens
ataagcacatacacagataggtagctgatgctcagcgaggttaagcaacttgtccaactattgaatggtaag

SEQ ID NO: 2322 - DNA, 72 bp, Homo sapiens
cttgactcttgaaataattaaagagagcagttctccgttttggccttcaggaagggaaatctgcccatggaa

SEQ ID NO: 2323 - DNA, 72 bp, Homo sapiens
agacaagttcctggatgccggtggtttcttcatcccgggtcatttatcccagttgtgtaacctatgggaaca

SEQ ID NO: 2324 - DNA, 72 bp, Homo sapiens
tttctgtgccacatcaccatgactcagaccctcaccgacagcctccaagttcaagaggctattcttgggaca

SEQ ID NO: 2325 - DNA, 72 bp, Homo sapiens
aacaaaataaactcccaattcacagtcctccgttgcgtaacagtgagcagacgttctgagaaatgcatcgtc

SEQ ID NO: 2326 - DNA, 72 bp, Homo sapiens
tctcctcgcaggaggaatccaacctcagagagccccgtccggcccagaccctgccccagcccaggcaacaca

SEQ ID NO: 2327 - DNA, 72 bp, Homo sapiens
tttttttaaagatcacgttcattccccgtgcttatcgggagctgcgggagatggagtagcaccccagaatgt

SEQ ID NO: 2328 - DNA, 72 bp, Homo sapiens
ctctagttggaattgtgccagtcttctctggaggccgactcactcgtggagtggggaaaggggtggccaggc

SEQ ID NO: 2329 - DNA, 72 bp, Homo sapiens
agggcatttgatcactcctgaccctgttcttccctcgccttctctcaacgtggtggaaaagtgtttccagga

SEQ ID NO: 2330 - DNA, 72 bp, Homo sapiens
agataaaaatcatcacagtgaggtgtctccagggccgagctgaggccctggcccaggaagtctcaaggctgt

SEQ ID NO: 2331 - DNA, 72 bp, Homo sapiens
cgaggcgcgggtaggggaagcgggcgcacggcaggcgaggtggtgagctcgggagcctcaccttgctgcact

SEQ ID NO: 2332 - DNA, 72 bp, Homo sapiens
acttagccacccagcagcttctggggctttgcacacgctgtttcctctgccttaaaagctttcttccccatc

SEQ ID NO: 2333 - DNA, 72 bp, Homo sapiens
gcaaaaactcagttgtatgtaagaaaacccaattccgcctgagaaaaaggaagagttggagtcctttaaaaa

SEQ ID NO: 2334 - DNA, 72 bp, Homo sapiens
gactcaccaggagggttggagtctttcgcaacgtacgtaaccccttccacctcttgttaggcagctccttgt

SEQ ID NO: 2335 - DNA, 72 bp, Homo sapiens
tttctgcctctgtgttgttgcttacgctggtctctcggcacgcaggcctccccctcccgctttctgcccaat

SEQ ID NO: 2336 - DNA, 72 bp, Homo sapiens
agccgctgaggcctcccacctgccccaagtgagcacggcctctgcaggggccacccagtgaatcggcagcca

SEQ ID NO: 2337 - DNA, 72 bp, Homo sapiens
ctttccctctgcccaagtgagcacagggaccgccccgcagcaagacgacggcagatatttaaaatgtgagga

SEQ ID NO: 2338 - DNA, 72 bp, Homo sapiens
atccactgcacgaagacgtccgcgggagagaagcccgtcaccaggcacgtgatggtggccgactcccgcagg

SEQ ID NO: 2339 - DNA, 72 bp, Homo sapiens
accaaacctcctttctcaatggagaacctgctggtcgctgtcctcggggagctagactcttgtgcacacaca

SEQ ID NO: 2340 - DNA, 72 bp, Homo sapiens
gggacagttcattccccaagaggcctctccaggggcggaggcgggtgctggggctggcctgtctgcagctcc

SEQ ID NO: 2341 - DNA, 72 bp, Homo sapiens
aagaacacagctgagtctccaatcagtgagtctaccgccactgcagggtcaggcagcagtgccaacctagat

SEQ ID NO: 2342 - DNA, 72 bp, Homo sapiens
gctcccaggtcttccagggatgcatcatcaatgaccgttcctctgtcatcatgcccgcgctccaggcagttg

SEQ ID NO: 2343 - DNA, 72 bp, Homo sapiens
gtcatgctggggagcaagtgttgcagcccagctttcgtcctcccgaggaagcaaacactggctccctctcca

SEQ ID NO: 2344 - DNA, 72 bp, Homo sapiens
gtggattcctgacatttatatagtgagtagatgatcgtttgttagaattgcgaatttcatccagagaatttt

SEQ ID NO: 2345 - DNA, 72 bp, Homo sapiens
gcactaaggaccccgaggagcacggggatgtctgccgggtccttctcatggtgcggtgggaagctgccgaag

SEQ ID NO: 2346 - DNA, 72 bp, Homo sapiens
aaggtctcttataaatatctgccaagggctcctgacgcaaagggcttcctggacccaggggaaggttctggt

SEQ ID NO: 2347 - DNA, 72 bp, Homo sapiens
attggcagatgctggtggagcaggcctgcccttgacgtgggcaagaagcttggggaaaaagacaatttcctg

SEQ ID NO: 2348 - DNA, 72 bp, Homo sapiens
tgaggctggcagccaggctagctagcacaggaagacgcttaatgccttccatccctgagtgctgcattcact

SEQ ID NO: 2349 - DNA, 72 bp, Homo sapiens
ctcagatgtatagaggtcagatgacttaagaatcacgagattcaacaaaaccaaagagagagacgctttaga

SEQ ID NO: 2350 - DNA, 72 bp, Homo sapiens
gggtctgagtcacagcccaggaaagtgtcaggccccgcctagggaaacttcccgccagcagcctcacgttct

SEQ ID NO: 2351 - DNA, 72 bp, Homo sapiens
catagcttcgggctggctgagagccaccccacattcgcctacactctctggctcatgtttgctgctgatggc

SEQ ID NO: 2352 - DNA, 72 bp, Homo sapiens
aaaagcccgcaccaaccatgccagtggcagccagacgaggacacagcctggctctgggtcccagcaggaaag

SEQ ID NO: 2353 - DNA, 72 bp, Homo sapiens
cacactcagcatgagacaggcgctcagtaaaagcccgtccaggggatatgagatcagtgagggataggaaag

SEQ ID NO: 2354 - DNA, 72 bp, Homo sapiens
cgccccatctggccctggctcatcacattcctcagcgtaaagcaccctctgcccttgttctcgttgcagcaa

SEQ ID NO: 2355 - DNA, 72 bp, Homo sapiens
ttcctgcctgagacccagtcattgtgaagtatttgcgtaataaagcacagctaatttacttctataaatgag

SEQ ID NO: 2356 - DNA, 72 bp, Homo sapiens
tttcacaagcgggctaacactcacctttatgaatacgaaaatttatgacaaaggacaggattacagttctac

SEQ ID NO: 2357 - DNA, 72 bp, Homo sapiens
agcttctggcaatctctcctctgctagtgcgaccacggccaggcttgagggcctcagtcagatgacccagcc

SEQ ID NO: 2358 - DNA, 72 bp, Homo sapiens
tccttgaaataccctttcagtaatcattcaaccaacgcttccatgtctctactctgtcgtaacaaaggctgt

SEQ ID NO: 2359 - DNA, 72 bp, Homo sapiens
ttgacaccttttgctaccactgggccacgatccgccgggtaacgggcgtcttcccagacgctggcgtcaccg

SEQ ID NO: 2360 - DNA, 72 bp, Homo sapiens
cacagtgggggcagctggcggtgtggaacaggggccgccctgggaatgtggaaggccagctggtgccactcc

SEQ ID NO: 2361 - DNA, 72 bp, Homo sapiens
ggctgacacctgttggaaccataacatcaattttgcgggctgtgacatcaaaatgcccctagtacgcatgag

SEQ ID NO: 2362 - DNA, 72 bp, Homo sapiens
ggcattcctccctgcttctgtttccctttggacagcgtctgtgatggctaactcaccattcagggacattca

SEQ ID NO: 2363 - DNA, 72 bp, Homo sapiens
gagaaaagtcacatccagctccttcatgttgctgccgatgtgggattttcctggcttcgtcagccaagcaat

SEQ ID NO: 2364 - DNA, 72 bp, Homo sapiens
cttttgcagtagtcaagaacatgtgcctggtttgccgatctctttcccagagttccttagtcaccctcaaat

SEQ ID NO: 2365 - DNA, 72 bp, Homo sapiens
tggccagcagaggtcacgaataaactgcatctctgcgcctggctctctaccacctctggtctttgtttcctg

SEQ ID NO: 2366 - DNA, 72 bp, Homo sapiens
cagtcctaagccacaccctgttcaaacttcaccaacggacctgagtctccgatcacaggcctgtccctcccc

SEQ ID NO: 2367 - DNA, 72 bp, Homo sapiens
ggtataaaggacaaggaggaccatggagactttaacgctgggcctggatggaggaggagaccagtgctgcaa

SEQ ID NO: 2368 - DNA, 72 bp, Homo sapiens
ccacctcctgtttaaaagggccaagtgaggccaggcgtggtggctcatgcctgtaatcccagcaccttggga

SEQ ID NO: 2369 - DNA, 72 bp, Homo sapiens
aaggtcacccttcttatcctgcctcagggttacatcggctttctcgctctgcgccaccaaatccacaggcac

SEQ ID NO: 2370 - DNA, 72 bp, Homo sapiens
ctcagtgggcctcttggttctgtttctctggagaacgtaacacagatttttggtacggggaatagggtactg

SEQ ID NO: 2371 - DNA, 72 bp, Homo sapiens
ttaagcaagacaagactgttaacagttctagagctcgtgggctccgcagggcagcagtcaccctaccaccag

SEQ ID NO: 2372 - DNA, 72 bp, Homo sapiens
agaaaacctgctctagaccaagggttgctttctgccgtgtgcctcaccccacccccactcgtgttccctaat

SEQ ID NO: 2373 - DNA, 72 bp, Homo sapiens
catttctctgaacatatcccagtcattaagcaatgcgtgactgtatttcctttttttttttttttttttgag

SEQ ID NO: 2374 - DNA, 72 bp, Homo sapiens
agggctctttcctgggtgacagcccagccttgagccgtagcactctaaagaggaagagcccagcttccacag

SEQ ID NO: 2375 - DNA, 72 bp, Homo sapiens
aggtggccccagctgctagaagtgccacggcttcacgttgcaacactcagggacatcaaggaagaggagcaa

SEQ ID NO: 2376 - DNA, 72 bp, Homo sapiens
atgtcaactgcctgcctttgggtggtgtcctggctcgggggctgcttggtggggaggggagacagagatcta

SEQ ID NO: 2377 - DNA, 72 bp, Homo sapiens
gcaccagaggttattttgatgttctctgggaccttcgtattcaaagagtagctcacattccagcacctgcag

SEQ ID NO: 2378 - DNA, 72 bp, Homo sapiens
tacgttggcaggggcagccacacatgtggagtgggcgtgggggtgggctggcatctggctgtatggttgcgc

SEQ ID NO: 2379 - DNA, 72 bp, Homo sapiens
cctcggaacccctggggcaggcgtgctggggactacgtggggggatacctgcgccattccccagacgcctct

SEQ ID NO: 2380 - DNA, 72 bp, Homo sapiens
ggctgcagggcctcagagctggggagggcaggctccggccaagtgctgtggggagcacttcccatcttggcg

SEQ ID NO: 2381 - DNA, 72 bp, Homo sapiens
ctgccgcactctgatgggtagagaacacctgtcttcgcaaccagtatcgctgcagcaacgggaactgtatca

SEQ ID NO: 2382 - DNA, 72 bp, Homo sapiens
actccaaaggtagctagttcgagttgaatcgtgcacgtgctgtaagtgtgaaatacacctaggtaccaaaga

SEQ ID NO: 2383 - DNA, 72 bp, Homo sapiens
aactagtcataggccccagttgagacaattattgccgggaaagaagctgaaatgcttgactagcactgatgc

SEQ ID NO: 2384 - DNA, 72 bp, Homo sapiens
ctggttcagccactcaattcctctcgctatcttcgcgctgctgctgctttatctcagtgttcggagcctagg

SEQ ID NO: 2385 - DNA, 72 bp, Homo sapiens
tcggagtgaccagccctgggcctccttcccagcttcggccctggctccatgtggcccatctgagaggctggc

SEQ ID NO: 2386 - DNA, 72 bp, Homo sapiens
agagggaagatgagtggtcaactgcgaggaaaccacgtaaagggtgtaagagacaacggttgcccatcgaca

SEQ ID NO: 2387 - DNA, 72 bp, Homo sapiens
ttagtgactcaccccggtggacgccgccccacagacgcgttttgaggggctgctaccaagggcacgtatcaa

SEQ ID NO: 2388 - DNA, 72 bp, Homo sapiens
acagcttgcagagcgaggccttcatggccaggatccgggtggagaggacctgagggcaggaagccaggtcac

SEQ ID NO: 2389 - DNA, 72 bp, Homo sapiens
taacagcttgtttttctttagcactacgtgcctgccgctctgctatgcattttacgtggattgtcttatgta

SEQ ID NO: 2390 - DNA, 72 bp, Homo sapiens
tctcgtggggcttcgtcttttggacgtcctgggtgcgcctccactgtggctcctgggttccctcacgcaccc

SEQ ID NO: 2391 - DNA, 72 bp, Homo sapiens
caaaaccaaaataatcaaacacagtggtgtcttaacgttggaaagcaaccccaccaaccatttgatctagga

SEQ ID NO: 2392 - DNA, 72 bp, Homo sapiens
ttagcctgactcagcatgagcctggcttctcctgccggccggcacaggggtgggtaccatgcacatggtctc

SEQ ID NO: 2393 - DNA, 72 bp, Homo sapiens
cgtgtgggaggccgagcctgtcctcggatcagttgcgtactctgcccgccccctctgactcatgctgacaat

SEQ ID NO: 2394 - DNA, 72 bp, Homo sapiens
gtgtgacgttaggcagttgctcaatctttctgattcgtagctatttgtcaaacatggtgattcagtgaggat

SEQ ID NO: 2395 - DNA, 72 bp, Homo sapiens
tgtcacttgggctcctcaggcagccactccagaggcgagaggggcatccaggtctccaacagagccagcacg

SEQ ID NO: 2396 - DNA, 72 bp, Homo sapiens
ctaccattgtctaatttttcctctttgcctttttgcgcaatgactgaggacgcacgccctggccacagcccc

SEQ ID NO: 2397 - DNA, 72 bp, Homo sapiens
gcatgataggcctggagttcttcaagaggcctcctcgcacatccttaccacccggagagcctcagtttggat

SEQ ID NO: 2398 - DNA, 72 bp, Homo sapiens
acagcaatttgaaagcgaggctctggcggtgtcgccgattcctacaagatagcatcgcacccctgggtgtca

SEQ ID NO: 2399 - DNA, 72 bp, Homo sapiens
atgccctggtccagagccagatgtggtccagctgccgcaggctgggtgtgaaactccaatgcttggctcatt

SEQ ID NO: 2400 - DNA, 72 bp, Homo sapiens
ccgaggatgggagctgagggctgggtctttgcgggcgagatgagggtgtcggatcaactggcctacaaagtc

SEQ ID NO: 2401 - DNA, 72 bp, Homo sapiens
gcggtgtttgcgggccagcgcgagttccaggtgggcgtgggctcagtgggccccgcactcgtagtggccggc

SEQ ID NO: 2402 - DNA, 72 bp, Homo sapiens
ggaggacaggatgctgggcaggggaagccaagtcacgggcaggccgcagtggttcttgcgtggcctggtttt

SEQ ID NO: 2403 - DNA, 72 bp, Homo sapiens
ctccagggactgagggagcactgcagctgtgggaccggcgcatagctaaaagccggcgggccatagggcccc

SEQ ID NO: 2404 - DNA, 72 bp, Homo sapiens
gggggtggggtcaggctgccacccacagggtctcacgacctgggcaccaggacagatgtgcacagtctctac

SEQ ID NO: 2405 - DNA, 72 bp, Homo sapiens
ttgtatatctaagaggtcactttgtggcaagaaagcgagaatgtggttgggtcacaagaaaacccaagcgag

SEQ ID NO: 2406 - DNA, 72 bp, Homo sapiens
tggacttaataactgagctgtttttactcaccacccgcccaacacccttctttttcttttatcattgtcagc

SEQ ID NO: 2407 - DNA, 72 bp, Homo sapiens
gcagcctacctggtgtcccctaccccacctgttctcggagaaccaagttgctacacaggaagttctccaagg

SEQ ID NO: 2408 - DNA, 72 bp, Homo sapiens
actgaacagggctcacgctgcagaggcagagtctgcgaggcagagacagcaccggccaccgcaccaccgcac

SEQ ID NO: 2409 - DNA, 72 bp, Homo sapiens
accctaatgagttgaccagtgatgggcagcccctacgaaacttcagggtagggctagtcacagggccaaggc

SEQ ID NO: 2410 - DNA, 72 bp, Homo sapiens
catcccggaaggcctccaccagcccgaacctggcccgtccgccctagatggggcaatcggcgtttctcccgg

SEQ ID NO: 2411 - DNA, 72 bp, Homo sapiens
caggaagtcctgtagatgagcacaggagattggctcgctggggaacggaaagggagattaagcaagacaaga

SEQ ID NO: 2412 - DNA, 72 bp, Homo sapiens
gcaaggctgcagctgcagggggtatccgggcgctacgtagccccccagcggcagcgtgcccacagtccccgc

SEQ ID NO: 2413 - DNA, 72 bp, Homo sapiens
cttttgtctatggattcatgatctttattttctcccgaactctctttatgatcatttcagaggggtctgggg

SEQ ID NO: 2414 - DNA, 72 bp, Homo sapiens
cgctctgctcagctgcctagctgctggactgcccccgcacagatcagggaagttcccagagcagcacgtgag

SEQ ID NO: 2415 - DNA, 72 bp, Homo sapiens
gaggaaggagaggctttgcttcatattgggaagttcgctgacgcaaattcttgagttatgtgtattgcaggt

SEQ ID NO: 2416 - DNA, 72 bp, Homo sapiens
atgtctctatttccgtgcagctctgtgagagcgagcgtgggcacggctgtttgacctaggttccctttgaaa

SEQ ID NO: 2417 - DNA, 72 bp, Homo sapiens
ctagatgacttccccgtcctttgtggctgtgtgtgcgcgcgtgtgtgcacagtgcagggcccgggggacagc

SEQ ID NO: 2418 - DNA, 72 bp, Homo sapiens
acgctggcgccccctccctgggtactcccttaggtcggccagtctgttacgacattaaggaccccctcagaa

SEQ ID NO: 2419 - DNA, 72 bp, Homo sapiens
taaatgggagatttcttcatagcatttatcataatcgaaaactcaaattaggaataatgatcctgagagggc

SEQ ID NO: 2420 - DNA, 72 bp, Homo sapiens
gtggggtcagcgctgagcgggtcaagagcccgcgccgggggccatccccctgcgctttctatcgagttaaac

SEQ ID NO: 2421 - DNA, 72 bp, Homo sapiens
cagagcagcaaactcaaggctatggctggccctggcgaaggccagatgccaaggcccaagacccagagtcct

SEQ ID NO: 2422 - DNA, 72 bp, Homo sapiens
gttcctgcaccaaggctaggatccacagaaaaccacgaggaaatgtgatttcaaaacagtgatgagttaggg

SEQ ID NO: 2423 - DNA, 72 bp, Homo sapiens
ttgggtattctgcctcactgccctgcctaaacttccgttattggcaaggacctgccaacagctccttcctcc

SEQ ID NO: 2424 - DNA, 72 bp, Homo sapiens
cagcttcctcatctgataatgggagctattgcaatcgctactgtttcccccttgccttctagaaggcctgac

SEQ ID NO: 2425 - DNA, 72 bp, Homo sapiens
tggctctcctctgcaggccccttatccttctggggcgagactggcttacttacacagaggtctcagagcaga

SEQ ID NO: 2426 - DNA, 72 bp, Homo sapiens
gaattcagaggccaaagctgtgtgggccaagctcccgcattcccctgattattatttatttgcagagtgccc

SEQ ID NO: 2427 - DNA, 72 bp, Homo sapiens
tatgaaaggctggggctcagggcagcagccatgatcgagaagccaaacactaaaggcgttttgccagaggtg

SEQ ID NO: 2428 - DNA, 72 bp, Homo sapiens
agagtcaggcccacatagggagaggctgcgacaatcgtatctcatcttcagggtttttgtgagaacatgttg

SEQ ID NO: 2429 - DNA, 72 bp, Homo sapiens
gctggagtgtggtttccctccggggcgcgcggctgcggtcccacgatggagcgtgcagccaactctgggtgg

SEQ ID NO: 2430 - DNA, 72 bp, Homo sapiens
gcatacaggaagatacatgtctcagaaagtatcaacgtcctttccttagctccttccagttcagaggtcact

SEQ ID NO: 2431 - DNA, 72 bp, Homo sapiens
ggctacccaggaggacgagaggggcagggtactggcggcagcaagagagaacccgcccaggagggcccagca

SEQ ID NO: 2432 - DNA, 72 bp, Homo sapiens
acccacagagggtccagctagagccctctgtggaccgcagagtcccaccagctacagcccacttctattacc

SEQ ID NO: 2433 - DNA, 72 bp, Homo sapiens
tcctgcatcatttgctcgttctgcctttgaatcgccgccaacctttgcgcttcagccttttcagcttctgct

SEQ ID NO: 2434 - DNA, 72 bp, Homo sapiens
cacccggtttattaattgaagaatttcctcttacccggaatgggaagttcacattaaaatcgagcttgccct

SEQ ID NO: 2435 - DNA, 72 bp, Homo sapiens
gactggtttccctgggtgggactgacccacttcagcgggaagaagagggtatgtggactggaggttgtgcca

SEQ ID NO: 2436 - DNA, 72 bp, Homo sapiens
agtcagagcatctggacagactgtctgataggctgcgctgagcagaatgcatccgtctgggtcaggagtcag

SEQ ID NO: 2437 - DNA, 72 bp, Homo sapiens
ggcccagtgccaagggcgaggcctagaacacaggacgctcagaaatgcttcctggcaggagggccaggtgag

SEQ ID NO: 2438 - DNA, 72 bp, Homo sapiens
tcttggtactcttgccctgtttcataggattcttacggtttgtgggaggcttggagggagtagtgaggaacc

SEQ ID NO: 2439 - DNA, 72 bp, Homo sapiens
gggtgcatgtataaatagagggatgcgtaagcctgcgtttaatatctagcacataaaccggccaccactgcg

SEQ ID NO: 2440 - DNA, 72 bp, Homo sapiens
aagaaaccactggcatccaggaacttgtcttagaccgttttgtaggggaaatgacctgcagggactttcccc

SEQ ID NO: 2441 - DNA, 72 bp, Homo sapiens
agcccggcagctgggcttccggaagcagcgggagccgggagcctgggaagggcctcgctgcttctctggagc

SEQ ID NO: 2442 - DNA, 72 bp, Homo sapiens
ctctttctctgtctctcataaggaactaaatcctgcgttttctcaccagagggctaatgacacactgcttag

SEQ ID NO: 2443 - DNA, 72 bp, Homo sapiens
cccagggatgaagctgatggggaaggcagctcctccgggggggtggacccagaagccccttcctccagcgat

SEQ ID NO: 2444 - DNA, 72 bp, Homo sapiens
ggcgggggggccttggtggaggtgacagagcatgtcggctgcgagtctgccaacacacaggtcctgcaggtg

SEQ ID NO: 2445 - DNA, 72 bp, Homo sapiens
caccactctataaacaccaaatgtattgctgagctcgagaataaaaatgatatgtgttaactgtaggcaagg

SEQ ID NO: 2446 - DNA, 72 bp, Homo sapiens
ttttgactatctgggttagaggaagatatgtgtaccgcctttagggcattttgttatttccgctgaatcatt

SEQ ID NO: 2447 - DNA, 72 bp, Homo sapiens
ctatatgacaaacctaatgctgggaatttcattgccggcatttggtcttcacattgcccagtgaggaaggtg

SEQ ID NO: 2448 - DNA, 72 bp, Homo sapiens
ggtctgcaggaaggacacacggaggccagtgcacacgctcttcacacagcctgagataaatatttcccggga

SEQ ID NO: 2449 - DNA, 72 bp, Homo sapiens
atcctaccactcctcatttctgctctgggctggaccggcttcccttttcttctgttgttttaaacggttggt

SEQ ID NO: 2450 - DNA, 72 bp, Homo sapiens
gtgtgctggctgcagtgctgtgtgccgggcgtggccgtggcttttttctgagtgcagctgatgctcgcagct

SEQ ID NO: 2451 - DNA, 72 bp, Homo sapiens
cgggtcgagatttacagcggagtctcatcccgggacgtgtgagtgcacttcagcgcaggactgccctggact

SEQ ID NO: 2452 - DNA, 72 bp, Homo sapiens
tgacgcatgcaatttttttttttttgagatggagtcgcactctgtcaccaagggtatagtgcaatggcgcaa

SEQ ID NO: 2453 - DNA, 72 bp, Homo sapiens
agcggaaggctcacaaactggcaaaattctgcctccgccaagagacctacggcagctggatcacaccgtgga

SEQ ID NO: 2454 - DNA, 72 bp, Homo sapiens
tcacacacctctatatttaataagcaggaccatgacgaggtttggtgacctcagggcccaaatggactgtct

SEQ ID NO: 2455 - DNA, 72 bp, Homo sapiens
tggcgtctgtgtagaaggggaaatgtgggcacagacgtgatgcaaggaggacaaggtgacgcttccacaagc

SEQ ID NO: 2456 - DNA, 72 bp, Homo sapiens
aaatagtcagtgactcaggaatgctgtttcccaatcgccgtagcaactgtcttctcctcccatgttatgatg

SEQ ID NO: 2457 - DNA, 72 bp, Homo sapiens
tcgtcaccctgggtgttcctttattttctttcctgcgctggattctctgctttccatgttttgctccctcat

SEQ ID NO: 2458 - DNA, 72 bp, Homo sapiens
gagcacgtgattacgtcactttcttcctttttgtgcgttttgtgcagcccctgccaaaccagccccctagga

SEQ ID NO: 2459 - DNA, 72 bp, Homo sapiens
agttggtttgagctcctctgactgttctctttgcacgtggcccggcacggcttgaatccacgccccttgcag

SEQ ID NO: 2460 - DNA, 72 bp, Homo sapiens
tcctccaacccttccaggagctgcgtgagaccaagcgccgtcatgagacccgactggtggagattgacaatg

SEQ ID NO: 2461 - DNA, 72 bp, Homo sapiens
aaaaagagagtaacattttcatgtttcctgttctccgtggctgtactgggatgggaagttagggatgtggaa

SEQ ID NO: 2462 - DNA, 72 bp, Homo sapiens
gctctgcccccgcctggggtttgttttccagaaggcgttgcctccactgaggacctttctggaggacgcaag

SEQ ID NO: 2463 - DNA, 72 bp, Homo sapiens
gcacgatgcccaagatcacacagccagcaggtggccgggaggggctcgaccccgtgctgtcaggcaccagag

SEQ ID NO: 2464 - DNA, 72 bp, Homo sapiens
gcacatggagatggtgaaatctgggagatgggatgcggtgcttggtttgagaaaccctggaccaggtcctca

SEQ ID NO: 2465 - DNA, 72 bp, Homo sapiens
aagaaaaataaagtgttaccacagactttgttctccgtgaaacccctgagcagcaggattgagttctgacgt

SEQ ID NO: 2466 - DNA, 72 bp, Homo sapiens
aaattccacagcaggtataacttcctctctaggaacgtttctcactctgcgggcaagtgctccagtagaaac

SEQ ID NO: 2467 - DNA, 72 bp, Homo sapiens
aaccagcctgctcttcccatggcctgtgcttcccccgccccagcccctccagccaggtcacccctcccagcc

SEQ ID NO: 2468 - DNA, 72 bp, Homo sapiens
agaaggaagtgggtaagtatgaagtgaccaaactgcgaaggaagcttgaagtgacaactgaacaaccccagg

SEQ ID NO: 2469 - DNA, 72 bp, Homo sapiens
gtttgtaccacaattaccttcagggttggtaaggccgattattgggcacaccctcagagtttcttactcaga

SEQ ID NO: 2470 - DNA, 72 bp, Homo sapiens
tacagttacttctatttagcccactgtgttctagacgggaatattctcaagaatctgactactcttatttcc

SEQ ID NO: 2471 - DNA, 72 bp, Homo sapiens
ccccgggagcacagatgccaggatgtgtggattggcgcccttcttgggctgctgggccccgtggtctgctaa

SEQ ID NO: 2472 - DNA, 72 bp, Homo sapiens
tcctcccttccttccttccttcctttgttttctttcgtcagctatctttagtgatcctgtattttaggtgtg

SEQ ID NO: 2473 - DNA, 72 bp, Homo sapiens
agccttgtagtgcagcgaatctggacccggcccagcgtccagagacaggaagcattaataggagcgaatgtg

SEQ ID NO: 2474 - DNA, 72 bp, Homo sapiens
ttctgtcatctcaaagatccatttccccaggctgtcggaatgtaaatgttaaggtgatgaaaatagtgaagc

SEQ ID NO: 2475 - DNA, 72 bp, Homo sapiens
cctggttcccactgtgtggccttcggcaggtcattcgccctctgcaagccacccttttctcctctgtaaaac

SEQ ID NO: 2476 - DNA, 72 bp, Homo sapiens
ttctgggaaagggcgtgagctgcattttccagctgcgctcactctgcagggagactgtgacgcccccgccgc

SEQ ID NO: 2477 - DNA, 72 bp, Homo sapiens
ttgatcttaccttgcttacaaatctctttgcactacgtcacacaacctcaaagagttgatgtgttttcatgg

SEQ ID NO: 2478 - DNA, 72 bp, Homo sapiens
gtgtggtcagacatctggccaggtccatctctgaccggctcctggtcaacccccagggagctggaagagtgc

SEQ ID NO: 2479 - DNA, 72 bp, Homo sapiens
tctccaagtgaattttctaaaaatgtattttataccggcttattcctagtattgaataaactagcgggctca

SEQ ID NO: 2480 - DNA, 72 bp, Homo sapiens
agtttggggcctggtattgcctcacctcttctcgccgcgagcattgacagaagatctagttgagtcctactt

SEQ ID NO: 2481 - DNA, 72 bp, Homo sapiens
ttcagcatgacggacatgattctgttttcgctcatcgtgggtctcctaacctactggttcctcttcagaaag

SEQ ID NO: 2482 - DNA, 72 bp, Homo sapiens
tgtggtcatctgtacatgcggcattcacgttagtgcgcatgcgcaaaaggtgcctaccgccctgcgctgcag

SEQ ID NO: 2483 - DNA, 72 bp, Homo sapiens
gaaaggctgtacaatttaaccgctgatgttgcagccgtcgcgcccttctgctgggggacctggcctagtcag

SEQ ID NO: 2484 - DNA, 72 bp, Homo sapiens
gatggggatacagtaaacttcatgaagtagtctcgcgtcttatctgctccctagaccctggagggcgtccac

SEQ ID NO: 2485 - DNA, 72 bp, Homo sapiens
ttcactgaaaaaataccagtgtttcacaatatttgcgtgatggaaagagttaacatagcaggcctgacactg

SEQ ID NO: 2486 - DNA, 72 bp, Homo sapiens
caagtcgcttgacatcttccaggccccaattcctgcgccctcacaggaggcagggggccatcccacaggctt

SEQ ID NO: 2487 - DNA, 72 bp, Homo sapiens
gggaccatttcctgctctgctgtggtctactggaccgtctggcatcgctgtgaccgcatgggccgtgctcca

SEQ ID NO: 2488 - DNA, 72 bp, Homo sapiens
gagaccccacgtggtcccgaccgaaggacctggtgcgtccaggttaacggagctggggcgctccaagtccgg

SEQ ID NO: 2489 - DNA, 72 bp, Homo sapiens
catctttggtagtcagtgggcagttttctccctgccgagtttactttttttgcattttgaagttcaagatca

SEQ ID NO: 2490 - DNA, 72 bp, Homo sapiens
gccgggaccccgagcctggctccaaaccctcgaggcggatctttggacagaagcagctcttccccgaacact

SEQ ID NO: 2491 - DNA, 72 bp, Homo sapiens
cagatgaagcatcttagaaacaagaatgaaaacagcgtttgatttttacaaaagccaattcagaggctcact

SEQ ID NO: 2492 - DNA, 72 bp, Homo sapiens
ctttaggaagcaagtaacagaggtgctgggctgcccgggcctctaggtcgtcttctttcccaggctctgtgc

SEQ ID NO: 2493 - DNA, 72 bp, Homo sapiens
gacaacaagaaagaattggcagagtatgtgtttagcgggaagtttcataagaggtgtttcagttgactgcag

SEQ ID NO: 2494 - DNA, 72 bp, Homo sapiens
caggaacccagggacttcagaagggctggtttgtccgaaaagtgagaggaggcggaggagaggtgaggagag

SEQ ID NO: 2495 - DNA, 72 bp, Homo sapiens
accctgggccttggctgggggaaaggttccagaaacgtcatcacaacgatgcatttcatcagaactgagcac

SEQ ID NO: 2496 - DNA, 72 bp, Homo sapiens
ctcactgtggtgcctggcagacggtccacaaccagcgggtgcgttcagcttgaatggaccggggtcccacag

SEQ ID NO: 2497 - DNA, 72 bp, Homo sapiens
gctttcttaaaaatgtcacagtggccctgctgtcccgtcctaatgataggctgcgcctagggctaattctca

SEQ ID NO: 2498 - DNA, 72 bp, Homo sapiens
ggcacatcccacccgccaaccacagtgactgattgcggaagaggcacttgaccccaggtcacacaagggggt

SEQ ID NO: 2499 - DNA, 72 bp, Homo sapiens
atccttgggattctggccatcccggaggtacctcccgggtccgtggcggggcaagccctttttccacgacgc

SEQ ID NO: 2500 - DNA, 72 bp, Homo sapiens
aggtcgaagtgctttattcttgactcccgaattcccggaaactattaccaaagcagcttagttttctctcca

SEQ ID NO: 2501 - DNA, 72 bp, Homo sapiens
agctggggtggacaggaagaccatatgcagagtcacggagggacctgtggttggggacagagcagcacagcg

SEQ ID NO: 2502 - DNA, 72 bp, Homo sapiens
ccgaaggagatcaggcagccccacctgcaggagaacgtcagccctccaggggatcagcccctgccagttcca

SEQ ID NO: 2503 - DNA, 72 bp, Homo sapiens
ccaagataaagagacagattgatggttcctgccgccgccctgtcctgcccagttgctgatttcaggaaatac

SEQ ID NO: 2504 - DNA, 72 bp, Homo sapiens
agaaaactaaggtgcagagaagttaattaacctgccgagagtcacgtggcagagaaatgatttgatctagaa

SEQ ID NO: 2505 - DNA, 72 bp, Homo sapiens
ctaaattgattgctcataaaactatttcctctgcccggctgcccaccatctgggaagtgagaagcacctctg

SEQ ID NO: 2506 - DNA, 72 bp, Homo sapiens
tgtctatgagtataaattatgctgctggttaaaaccgcttgctcatgagaacaggacacccaggcgcgatcg

SEQ ID NO: 2507 - DNA, 72 bp, Homo sapiens
ggctaatttcctaagcctcccagctcccggcctcccgggcccagaactgcgcccactttcgttggccccgcc

SEQ ID NO: 2508 - DNA, 72 bp, Homo sapiens
aaagttgcttctctcagttccgcaactttccctttcggcaggcctgcatcaagtgccctctgtaacccagga

SEQ ID NO: 2509 - DNA, 72 bp, Homo sapiens
gctagggttccaggcatgagccactgcgccctgcccggagccttatgttaacatgtctattacaggacctga

SEQ ID NO: 2510 - DNA, 72 bp, Homo sapiens
gcgttgcgttttgtcagcaaattctgtcagaagcacggcaaacgctggagaaggtttgaggaagcgcatcct

SEQ ID NO: 2511 - DNA, 72 bp, Homo sapiens
ctctgggagtctgtttctgatgtggcaaccctggacgctggccaaaggcttggcctaacccctggctgccca

SEQ ID NO: 2512 - DNA, 72 bp, Homo sapiens
ttaaggcctccctttcaaaactgcagggacttttacggtgtttccaaaggtaattgcttcttacttcagtaa

SEQ ID NO: 2513 - DNA, 72 bp, Homo sapiens
tgctggcgcacagggtgcaccgacatccccacccacggctggtggagagcaggagaagggattgctacgacc

SEQ ID NO: 2514 - DNA, 72 bp, Homo sapiens
aagcaagaagtgagccagaagcaagcaggagctcacgtgggcctcagggaagatgctctcagtccagatagc

SEQ ID NO: 2515 - DNA, 72 bp, Homo sapiens
aacccagctgtcttggggacaggatcctgtgtgttcggttatgtcacctgtgtgtgcacggtcttcagttgc

SEQ ID NO: 2516 - DNA, 72 bp, Homo sapiens
gcctctccaagcccacagccctctgagcagagcaccggctagggggctcagaggggcctcaattcaccccca

SEQ ID NO: 2517 - DNA, 72 bp, Homo sapiens
tccttcccctgggtttctgagttttctcaacctgccgtttcctctgagctctgttcctgctctggggcctct

SEQ ID NO: 2518 - DNA, 72 bp, Homo sapiens
attcattttaattgtcactggagcatatatacttacgtgtttatttctgatgactagtaagcatggaatttc

SEQ ID NO: 2519 - DNA, 72 bp, Homo sapiens
ccatggtagaaaagagcaggccctaccagccaagacgcacagcctctgaccacagttcctgcttgccgctct

SEQ ID NO: 2520 - DNA, 72 bp, Homo sapiens
ctgacttgctgatgccccattctttccttggctctcggggagttctgggacctgggatctatcctttgcaaa

SEQ ID NO: 2521 - DNA, 72 bp, Homo sapiens
gggccagggtctgggccctactcacttctagctgtcgcatctgctctgcatgtggaactcaagaactgcgga

SEQ ID NO: 2522 - DNA, 72 bp, Homo sapiens
gtcctcagtgcatatcatactcaatctgtcactcccgtcttctagaaacactttcctcactccgcttctagg

SEQ ID NO: 2523 - DNA, 72 bp, Homo sapiens
agtccatcattttgctctgtatgtcttcacatcctcgtagctttgctctcacccacccatttcaacaccaac

SEQ ID NO: 2524 - DNA, 72 bp, Homo sapiens
agcaagggtgcctgcggcctgctgacgcaggctggcggggagtggcttgccttaggcctgtctccttgtctc

SEQ ID NO: 2525 - DNA, 72 bp, Homo sapiens
tgatcactaattctgttctgagcttttgtgctttccgtaattaaaggtaatttgcttaagtatctgacatct

SEQ ID NO: 2526 - DNA, 72 bp, Homo sapiens
gccctcctcacagaaaggctcagaagggacacaaacgcccctgcccttccaacagctgctggccagcaaagt

SEQ ID NO: 2527 - DNA, 72 bp, Homo sapiens
ggaagggaggcagtgggaggagctggcctagcttgcggggatctagcaggactcagccaatgtagctccagg

SEQ ID NO: 2528 - DNA, 72 bp, Homo sapiens
cctgttgcctcccatcagggggctcagcggatgtccggcttccagtcaaaaaggaaaaggttctgagaacaa

SEQ ID NO: 2529 - DNA, 72 bp, Homo sapiens
tccaatacctgcagagacaggtccagctcccactacgagggcccaccgaccaacacggtacaccgagggtga

SEQ ID NO: 2530 - DNA, 72 bp, Homo sapiens
gcgctgaaggcacatggcaagctgcttctccccagcggctggagtgccggcctccagcccctcccgcagccg

SEQ ID NO: 2531 - DNA, 72 bp, Homo sapiens
acttcggacttggtgttatttatttgggaagcgcccggacggcggagcttggcggcggcggtggtggtggct

SEQ ID NO: 2532 - DNA, 72 bp, Homo sapiens
gtagctgttgatttatttagctccgttggaccaaccgagagaagcttagcagttgagtgagtcattaaaata

SEQ ID NO: 2533 - DNA, 72 bp, Homo sapiens
ttctcagatcttctcacaaggtcttcagcaggccccgatgcgtcctcccccggcttaacccccatcagcatg

SEQ ID NO: 2534 - DNA, 72 bp, Homo sapiens
tgtaaagtgctatccacttccacctcctgggctgtcgtgcagatgtaggaaggaattgcactcacacactca

SEQ ID NO: 2535 - DNA, 72 bp, Homo sapiens
gtgtgtttttcacagacatcttgttacacaatcaccgtaagatactatccccattttattttatttttttaa

SEQ ID NO: 2536 - DNA, 72 bp, Homo sapiens
gaaataaagcacagtcagtacctgctctcaaaaaacggctgccaatctagtttggagacagaaaaatatacc

SEQ ID NO: 2537 - DNA, 72 bp, Homo sapiens
gtgaggtctgatgcacagccacagggagacacagacgagcagatgtgggcatccgagtatttacaaggtctg

SEQ ID NO: 2538 - DNA, 72 bp, Homo sapiens
gaggcagggcactcggctgcggatgggtaacagggcgtgggctggcacacttacttgcaccagtgcccagag

SEQ ID NO: 2539 - DNA, 72 bp, Homo sapiens
aggcgagtctcagggcccagcccacctgcatcagtcggggtgaggctggaccagtctgggcatcagtcccca

SEQ ID NO: 2540 - DNA, 72 bp, Homo sapiens
agctcacagtttagccaggaagagagacaaagaaacggttgattgcaacagagtagaatgccaaattagatc

SEQ ID NO: 2541 - DNA, 72 bp, Homo sapiens
cggggtgaatcatcagtcctggggaagaacccaggcgcctgagccccagctccgggaagcaggcactgggga

SEQ ID NO: 2542 - DNA, 72 bp, Homo sapiens
ccaagcagtcacggcaggcgccgccaggacgaggccgccacggcctctcttcttcctgccactcctgcccag

SEQ ID NO: 2543 - DNA, 72 bp, Homo sapiens
ggcatgttgctctaggagggacttagtactgaactcgcctcttgggaacgagatgccagctggaaagagagc

SEQ ID NO: 2544 - DNA, 72 bp, Homo sapiens
ttcctcaggctgtgcctgactctgcttccttctcccggcctgcctcaccagcagccagcagcccatccgttc

SEQ ID NO: 2545 - DNA, 72 bp, Homo sapiens
tgtcacttcctctgatgaaatcctgtcttcccccacggcccctcaactgatgccacctcaccctggagaggg

SEQ ID NO: 2546 - DNA, 72 bp, Homo sapiens
ggtgttgtagcaacattggaaatgggaggggtttacgaagtgaacatgaggtcaggtgcctgaattcaacag

SEQ ID NO: 2547 - DNA, 72 bp, Homo sapiens
ctcctccatcctggagagtcctttgttgaaaataccgcaaatatcttctgaagaggactctcccagggaaca

SEQ ID NO: 2548 - DNA, 72 bp, Homo sapiens
ccgccttcctctctggggggactgcctgccgcccccgcagacacccatggttgagtgccctccaggcccctg

SEQ ID NO: 2549 - DNA, 72 bp, Homo sapiens
tgactcggttgggctctgcaccccaaatgccatagcggcctccgggggaggcggggagcgctgtgttggccc

SEQ ID NO: 2550 - DNA, 72 bp, Homo sapiens
gtggagtgttgatggttcagtgcacatagcacctgcgtctgtgagtggagtgttgatggttcggtgcacata

SEQ ID NO: 2551 - DNA, 72 bp, Homo sapiens
cgccaaaggctgcaaggaggatgcagagtggggcccgcacagagcccggggctccagggatggcttctctga

SEQ ID NO: 2552 - DNA, 72 bp, Homo sapiens
cagccaggggcttgcacaggcacactcacattggacgtttgtgttcacagactccaggaggccagcttatac

SEQ ID NO: 2553 - DNA, 72 bp, Homo sapiens
tcgaactctagcggtccaagctctttcccaagtcacgtagcttctctattcggagagaagtcggagtactgg

SEQ ID NO: 2554 - DNA, 72 bp, Homo sapiens
ctacacacactatacgcaacagtaggtcagatcaccgaggcagctattaagtgactaaggggtgggtagtgc

SEQ ID NO: 2555 - DNA, 72 bp, Homo sapiens
ttcctgaagggtagttacaactgtgaggcagtggtcgctatggcttcctgcagtctccctgagttcctgcct

SEQ ID NO: 2556 - DNA, 72 bp, Homo sapiens
tcccctagaggtactgcagctgggagctttcagggcgtgtcttccccaccacccaacttctggaaccccaga

SEQ ID NO: 2557 - DNA, 72 bp, Homo sapiens
gcgtgagaaacaggaaaccatgggtgggagtgggccgtggtcttcaagggagccatcagcagcacattcagg

SEQ ID NO: 2558 - DNA, 72 bp, Homo sapiens
gacaagcagctggttagttagcagtaacccacccgcggcttctctgagcctcagaactctttccactctaac

SEQ ID NO: 2559 - DNA, 72 bp, Homo sapiens
ccccttggagccctgtgggcctgtttacaggagggcggaggctgccttggggcacagaggcagggccgtgag

SEQ ID NO: 2560 - DNA, 72 bp, Homo sapiens
tcttccctatgggctgcaaaggtggcctcgggttccggtgggagccccaactctggaccgcgattcgcgagc

SEQ ID NO: 2561 - DNA, 72 bp, Homo sapiens
gggtggcaggtcgacatgccgcagtcccagcactccgtggcgatggcgggcagggttggggtggggggccca

SEQ ID NO: 2562 - DNA, 72 bp, Homo sapiens
gcagcccgggagccacagggctccccagagacagccgcttgggctgcaatgtctccaagctacagtcccgct

SEQ ID NO: 2563 - DNA, 72 bp, Homo sapiens
gaatgtttttaggggcttgggaaagtatttcaactcgaagaaaggacttatagttactagaatcttcacatc

SEQ ID NO: 2564 - DNA, 72 bp, Homo sapiens
cagccatgtctcttcctccccgacctttccgttcacgacatacccggggagcctccctcttgtagaattgaa

SEQ ID NO: 2565 - DNA, 72 bp, Homo sapiens
gcgggagcagtgcttttcccagcctctgtgagctccgctgctcttccttccaatccttcgggtcgttgctcg

SEQ ID NO: 2566 - DNA, 72 bp, Homo sapiens
tgttccctcaggttgcacaactgggataaatgacccgggatgaagaaaccactggcatccaggaacttgtct

SEQ ID NO: 2567 - DNA, 72 bp, Homo sapiens
caatgaccccgacgccagactcaagcggggaaaagcgggcctagagctccagggcgggagcgacgccgacgc

SEQ ID NO: 2568 - DNA, 72 bp, Homo sapiens
ggcattcctcagcctgtggcctgaccgcattcttccgtcacccatccccttcccccagccccaggaatggag

SEQ ID NO: 2569 - DNA, 72 bp, Homo sapiens
tgtctctgtttaaaggaacttggactaaccgactacgaggctggcagctcagttacccaggcaaagccagaa

SEQ ID NO: 2570 - DNA, 72 bp, Homo sapiens
gggtttggtcactcccaggccctgctgttgcacaccgctttcaagacctgtccctttggtcaccctcctcag

SEQ ID NO: 2571 - DNA, 72 bp, Homo sapiens
cgcctatttgcaagccttctccctgtcattctcaacgcttctcctttctctccacctcccctgccactccat

SEQ ID NO: 2572 - DNA, 72 bp, Homo sapiens
ctgttctatttggcctctgactctattgggctccccgctccctagctgaagccgtttttttttttttttctt

SEQ ID NO: 2573 - DNA, 72 bp, Homo sapiens
cagcggcaggactccaggttgaggtagagcaggcccgggcagctgctgatcacagagctgtggggagggcag

SEQ ID NO: 2574 - DNA, 72 bp, Homo sapiens
actgcaggatcataggcctagacaggggatcctgacgcccttgaggaagtgagagaagaccagcgcagtcgt

SEQ ID NO: 2575 - DNA, 72 bp, Homo sapiens
ccaagactctgctcagtcacttcctggctgatccccgagtgctcaagtgtgtgatgagattagggctccccc

SEQ ID NO: 2576 - DNA, 72 bp, Homo sapiens
taagagggctgtgggcagttagtgataatcaaggtcgtatcccaactaagtgacagagctgagacagttaag

SEQ ID NO: 2577 - DNA, 72 bp, Homo sapiens
cccaaggctctggggtcggggagcattccatgtaccgtggtgttcatgactcaggcaaaagggaaaccccag

SEQ ID NO: 2578 - DNA, 72 bp, Homo sapiens
aataatctgacctacctcaccagagtgttgtaagtcggaataactaattaacgctagtgcagcacttttgaa

SEQ ID NO: 2579 - DNA, 72 bp, Homo sapiens
tattgggaatgaatagatcaaaggcagcagcatgacgggcgatcaatcagtcatcaaatcaaggatggcaac

SEQ ID NO: 2580 - DNA, 72 bp, Homo sapiens
gaagtttgtacagcacagatggcgattcaccagatcggctgcacattggaatcacttgagggatttcaaaaa

SEQ ID NO: 2581 - DNA, 72 bp, Homo sapiens
ccacaggcgtggctctgagccactctggagagtggcggggggcccagccagttctgtggctgggactttccc

SEQ ID NO: 2582 - DNA, 72 bp, Homo sapiens
cgcacagcgtctgcgctgggagcccatggacttgccgcgctcctgttcagcttctgcaactttctagccacc

SEQ ID NO: 2583 - DNA, 72 bp, Homo sapiens
ggggcctgaactccaggtcctgagggaggaagaggcgggcaggagctcagaatcctgggccccagtttggag

SEQ ID NO: 2584 - DNA, 72 bp, Homo sapiens
gccaagcctggctaaaacgagagaatgccccctcccgcccgttcacttactggtgcccagcaccgggcactc

SEQ ID NO: 2585 - DNA, 72 bp, Homo sapiens
tattcaattgccttcctaagacccagacggggcagcgctctccacaggccaccaaaaggtgttgcctgtttg

SEQ ID NO: 2586 - DNA, 72 bp, Homo sapiens
ctgcaggcatctggactgcaaagtcatttttcacacgtgctcctgggaaaccacatctcttcgtactttgta

SEQ ID NO: 2587 - DNA, 72 bp, Homo sapiens
ctaagtcatgttgggaatgtttccttctctcaagccggaagagctgaggtttatctgagaaatgcctatgtc

SEQ ID NO: 2588 - DNA, 72 bp, Homo sapiens
gcttgcttatgcatccccctctcttggttgtagtacggccgtaccatttcagcttgctagtgcagaaagatg

SEQ ID NO: 2589 - DNA, 72 bp, Homo sapiens
tcacacactactcaccctgtggaggaagttcgcctcgcttttgtggtgagtcttgctgtaatgatagcttat

SEQ ID NO: 2590 - DNA, 72 bp, Homo sapiens
caggggcagcaggaagaggctgggacagctagccacggagctgtcagcatgactcagcacttccacatgcca

SEQ ID NO: 2591 - DNA, 72 bp, Homo sapiens
gcaccctgcgcgctgcagccggccagcgcgagccccggcccagggactatctgcagcctcctacccagggcc

SEQ ID NO: 2592 - DNA, 72 bp, Homo sapiens
tttgaactgtatctttaaaacatttccattgaagacgttaaagctctttcgaaaatacaagaatggttcaag

SEQ ID NO: 2593 - DNA, 72 bp, Homo sapiens
tcctgtttacttgttggacttcccctagagcccagcgtgatgactccatcagtatctgtgacagtttcttgt

SEQ ID NO: 2594 - DNA, 72 bp, Homo sapiens
gttgcgcaggttcctggccaggggctcctcgctgccgtacaccatgctggcgtccacgaaggaagtgagcgc

SEQ ID NO: 2595 - DNA, 72 bp, Homo sapiens
tggggcacaaaagagctgaggaaaaggcaggccgacgagctgccatgggcttgaattgatcacaccccatga

SEQ ID NO: 2596 - DNA, 72 bp, Homo sapiens
agaatgaacaagatcaccaagggagagaatgtgtccggagaatagaagagggtcaaactcagagaggtcaca

SEQ ID NO: 2597 - DNA, 72 bp, Homo sapiens
atgaaagacggaaatgatctgcctggaacaggtgccggctgagcagtgtgtgccacccagcatggcccagct

SEQ ID NO: 2598 - DNA, 72 bp, Homo sapiens
cccaggctggcagggccccccaggtgggcacacgccggcagaggtccctcaggaccctgatgacgatcacgc

SEQ ID NO: 2599 - DNA, 72 bp, Homo sapiens
gcctgctccactccacggggccagaggcaccagcacgatgccgccccgactcggctctgcggtggcccctgt

SEQ ID NO: 2600 - DNA, 72 bp, Homo sapiens
aaaccaaaaggctcaggttcaaattgaaagctccccgttctacaagagctaaaaaataaccccactgccccc

SEQ ID NO: 2601 - DNA, 72 bp, Homo sapiens
agagtgtgctgttgtccactgtgtacggtgggtggcgattgctggaccccagacgctttccttggagcttca

SEQ ID NO: 2602 - DNA, 72 bp, Homo sapiens
gctatatttgactggctaaaaaaacccaaaaacagcgtaactcctcattgtggtgagaggagggagttgaca

SEQ ID NO: 2603 - DNA, 72 bp, Homo sapiens
attcactttgccagacgttcctcgccgggagtcgtcggggtttcctgcttcaacagtgcttggacggaaccc

SEQ ID NO: 2604 - DNA, 72 bp, Homo sapiens
aggcaggcaggcaggcaggcaggcaggcaggcaggcgaggtgaggcagagaatgaatgtgctgactcatgca

SEQ ID NO: 2605 - DNA, 72 bp, Homo sapiens
ctttcatgagttttctaggctttcatcactgccagcgtctccacaggcattgtgaaagtattaaacttccta

SEQ ID NO: 2606 - DNA, 72 bp, Homo sapiens
tctgccaccctgtgtgcagcccttgagacgtggctcgtgcagcaaggccaagtccctgattgttctctcgtt

SEQ ID NO: 2607 - DNA, 72 bp, Homo sapiens
tgtatccttttgctataataaatcacatccgcaagcgtttctatgtactgagttctgccagtgaatcaacaa

SEQ ID NO: 2608 - DNA, 72 bp, Homo sapiens
gaggatctggctgagaggcagaaaatggccctcagcgctctcggaacggtccttccagaagaactgatgaaa

SEQ ID NO: 2609 - DNA, 72 bp, Homo sapiens
gctcacagtgactgggtttcacctgcatgaagtgacgtggtgtttagctgatggaggcacaggatgtggggg

SEQ ID NO: 2610 - DNA, 72 bp, Homo sapiens
gtaaaggctccccagggattgtaactgttctcccccgttcccagcatcaggaaagcgaaacagatgtggaag

SEQ ID NO: 2611 - DNA, 72 bp, Homo sapiens
atgactcatctctgagttgtctcaacagtgtgttccgggaactggtagaacaaatggaatctttcaaaggcc

SEQ ID NO: 2612 - DNA, 72 bp, Homo sapiens
gtgggaaggattcacagaggaagatcttcaaaatacggaggtggcaagcattgttgtgtagccctaagtcaa

SEQ ID NO: 2613 - DNA, 72 bp, Homo sapiens
agctcctttttcaaattcggtgaggcgtttgtggacgagcacaccatgcaaagcggagcagaggaccccatg

SEQ ID NO: 2614 - DNA, 72 bp, Homo sapiens
ttccttgtaactgaaaacatgctccactactctttcgtgcttcttgtctgtcaagatgcctaggagtatgat

SEQ ID NO: 2615 - DNA, 72 bp, Homo sapiens
aaagggatttcattttgtgaaatatttgaaagcatcgaagtctagcatttcacgttttgcaagctggggaaa

SEQ ID NO: 2616 - DNA, 72 bp, Homo sapiens
tcctcaagtcagtgccgtatttagtgtagcactgacgcatttcttaaccactcaacagttctattgttttta

SEQ ID NO: 2617 - DNA, 72 bp, Homo sapiens
tgaggttgctgctgtggttgaactgcttgccacagcgagggcacatgaagatgaagtgctgcgcccgcatgt

SEQ ID NO: 2618 - DNA, 72 bp, Homo sapiens
ggcacaaatcaccactggagctcatcaaacgtggacgtctgagccccaggaaaaagccttcaaaggacagag

SEQ ID NO: 2619 - DNA, 72 bp, Homo sapiens
gagattgagaaaccctggctaacacggtgaaaccccggctaacacggtgaaaccccgtctctactaaaaata

SEQ ID NO: 2620 - DNA, 72 bp, Homo sapiens
gcaccagagcttcctgcccagttgttgcctggcaccgctgaagaaagctgcaaacgtactgaagaggtagca

SEQ ID NO: 2621 - DNA, 72 bp, Homo sapiens
tcacagggtatggcagagtcctcagttcaggctgacgagtggccatgccttttaagtgaagtctacagagca

SEQ ID NO: 2622 - DNA, 72 bp, Homo sapiens
cacttccgaaagaccccaggttctaggtgtgggggcgaggcctgtaacccctactcgaagggcattagggaa

SEQ ID NO: 2623 - DNA, 72 bp, Homo sapiens
gcatgagcttcttcagatcagactgccttccccaacgactatgtcagaactgtacccctccttcaagacctc

SEQ ID NO: 2624 - DNA, 72 bp, Homo sapiens
cagggaaatttgccaggggcaccacacagagagcacgccagggaggcgttgctcaatctctcacccacgtgg

SEQ ID NO: 2625 - DNA, 72 bp, Homo sapiens
ttgtcaggcaatgctatggaagggttatttagagtcgtagaagtgtctagtacaaccaccagctgatgaaga

SEQ ID NO: 2626 - DNA, 72 bp, Homo sapiens
gctgcacaccccacccttcctccaaaaaagttccccgcaagacaagttacttctcaaagttggggagacgga

SEQ ID NO: 2627 - DNA, 72 bp, Homo sapiens
actctccctctttttcccctttctcagctaaaaaacgttggctgaggtcacaacaaacaatggccaagcttg

SEQ ID NO: 2628 - DNA, 72 bp, Homo sapiens
gacacaggcagcacttttccccattttattcagctcgggcccttgtgactaggcccttagtttctttttatc

SEQ ID NO: 2629 - DNA, 72 bp, Homo sapiens
tttccaaactaggtcccaggaagcactggtttcggcgagtgttaccagatctcctgcaggggagaaacggtc

SEQ ID NO: 2630 - DNA, 72 bp, Homo sapiens
gtgctgggccgctgcagcgtcaccctcgggaatggcggtgtcttttcgtagaggacccccaacagtatctgt

SEQ ID NO: 2631 - DNA, 72 bp, Homo sapiens
caaacgggatcaggtgagactgcgtggcctcagcccgccagtgagcgatgggggtagtaacacaagagccgg

SEQ ID NO: 2632 - DNA, 72 bp, Homo sapiens
cagcctgaaacaaaatcacccccactccacccacccgcacaggggtgccctgaaccttttttagccctgagc

SEQ ID NO: 2633 - DNA, 72 bp, Homo sapiens
gcaacggcctcccagcacagggctataagaggagccgggcgggcacggaggggcagagaccccggagcccca

SEQ ID NO: 2634 - DNA, 72 bp, Homo sapiens
gaaatgagaattataatgcgaaccataccggagaccgggtaggttttctaagagtccctcgggctttgctgt

SEQ ID NO: 2635 - DNA, 72 bp, Homo sapiens
ccttgtttctggtttcactgcaagacgttatttaacgctagtggcaccagaggttccaacaagaacacatga

SEQ ID NO: 2636 - DNA, 72 bp, Homo sapiens
cctttggaaagctgggggactgagtggggagggcacggtgtggtgtcagcctgagcccactggatgacccta

SEQ ID NO: 2637 - DNA, 72 bp, Homo sapiens
aatcacagtaacccacgctgttcctgaaacagcaccgactgcaacactgcttccaccacagagtgcggaata

SEQ ID NO: 2638 - DNA, 72 bp, Homo sapiens
tcaggcattctggctacagaattcccactgttacacgccattgtctttcattcaagaattatagctgtgcct

SEQ ID NO: 2639 - DNA, 72 bp, Homo sapiens
aggtacataaaaactttgttaaaaattcatttgagcgtgagagtggggacaccagagtcactttgcagcccc

SEQ ID NO: 2640 - DNA, 72 bp, Homo sapiens
aggcctccttcctgggagggactctgtgagtgccacgcccagggccctgcagcaggtcgtgagcagatgcct

SEQ ID NO: 2641 - DNA, 72 bp, Homo sapiens
cacaaaaagcatcagaaagaaaatgaaaatgtgtccggcctcgtggcgcagggcttgcaggctcacttcccc

SEQ ID NO: 2642 - DNA, 72 bp, Homo sapiens
gtttgcaggctcaacttcacattgagacacttggacgtcacatgtgaagcctacgatcacttccgctcctgc

SEQ ID NO: 2643 - DNA, 72 bp, Homo sapiens
tgacagggctggagtatcctgctgggtttcagccccggttcctgcaggcacagctgccaggctctctgttca

SEQ ID NO: 2644 - DNA, 72 bp, Homo sapiens
accttaggtgatctgcccaccttggcctcccagagcgctaggattaaaggcgtgagccaccatgcgcggcct

SEQ ID NO: 2645 - DNA, 72 bp, Homo sapiens
gttatggagagggtgtccggtccctgtcccagtgccgagaaggaagcctcccacgactgcccggcagggtcc

SEQ ID NO: 2646 - DNA, 72 bp, Homo sapiens
gagcattgttatctctgtggtactgacgaagaccccgcaagctcaccgagattaagtgcccctgcctaaggt

SEQ ID NO: 2647 - DNA, 72 bp, Homo sapiens
gcttgggctgggggctgagcacctgtgacctccaccggcttccttctcctcctctctgaggactgaatctgg

SEQ ID NO: 2648 - DNA, 72 bp, Homo sapiens
caactttaccttcaggggaaattgaaaaccttcttcgtgcatggatacatcacctaaggacaagggagcatg

SEQ ID NO: 2649 - DNA, 72 bp, Homo sapiens
ggaagacagatgtttgcaagagtggtgccttaatccgtattgtgttgctgtaaaagaatacctgagactggg

SEQ ID NO: 2650 - DNA, 72 bp, Homo sapiens
ggcgtataacagccaattcatgaaccagcccgggccgcgggggcctgcctccatggggggcagcatgaaccc

SEQ ID NO: 2651 - DNA, 72 bp, Homo sapiens
ctgcccagcccacacctctgtgaggcaggcaggaccggtcactgctcccactttacagatgaggaaaactga

SEQ ID NO: 2652 - DNA, 72 bp, Homo sapiens
aggcccagagccatggctatctcctcttcctcctgcgaactgcccctggtggctgtgtgccaggtaacatcg

SEQ ID NO: 2653 - DNA, 72 bp, Homo sapiens
ctttctgaagtcctgggttgtatcagaatgagattcggctctgctcagcagaagccccagtcagcccaagag

SEQ ID NO: 2654 - DNA, 72 bp, Homo sapiens
gacatgttgcttttaaggtgttggcagttcttttacggtggcaaagttgtcctaaaaacagcccaaacagcc

SEQ ID NO: 2655 - DNA, 72 bp, Homo sapiens
tcactggtatttccccaggctggaagtgcgtcttccgtttacagggcagccacagctgtgctgggtacagag

SEQ ID NO: 2656 - DNA, 72 bp, Homo sapiens
catatgacccagcaattcccctcctaggtgtctaccgaagagaactgaaagcatgtccacacaaaagcttgt

SEQ ID NO: 2657 - DNA, 72 bp, Homo sapiens
actgatggaagttatatgtgttcccttccaggtatcgtgtccatacccagcccccagcctgcaggctagaga

SEQ ID NO: 2658 - DNA, 72 bp, Homo sapiens
ttccgcctctcatcctccacagtgaggagggtagtcgggaaaggctttctcccttaagttttcgtcaacttt

SEQ ID NO: 2659 - DNA, 72 bp, Homo sapiens
gaggctgagctgacagaggcttccagaggctggagcgtcactgtatttataagactggtggattgcacaacc

SEQ ID NO: 2660 - DNA, 72 bp, Homo sapiens
tgcacatgtcgcctcgcaccgtggcgggcgtgtcccgtggaaagctgcccatgctgcccacgccctccctgg

SEQ ID NO: 2661 - DNA, 72 bp, Homo sapiens
gcagtcccctggagttacctcatcagagcttggctcgctctgggttttacctctgtcttctcctagactggg

SEQ ID NO: 2662 - DNA, 72 bp, Homo sapiens
gaggatcagcaccagggccatggtgggcagatacccgctagagctggagccagggcttggtcgcaccctctc

SEQ ID NO: 2663 - DNA, 72 bp, Homo sapiens
gttgaggtgctgcacatagggtgcaggctgtggggcgaggggtgctgacatccagcccacccagccctccca

SEQ ID NO: 2664 - DNA, 72 bp, Homo sapiens
aggcgggccctcaggcgggaaggaatgtgcgcctgcgattccgggacgtcctgcaccagcccaggagaaccc

SEQ ID NO: 2665 - DNA, 72 bp, Homo sapiens
accccctggctttacagatgaatcaggcccagagacgccaggcgacttgagcaaggccactcagctgtcaag

SEQ ID NO: 2666 - DNA, 72 bp, Homo sapiens
cacagatcttgcaggtgcagggcagcgtgtgagtgcggatgtgcatcttgagggcacccaggctggtgtact

SEQ ID NO: 2667 - DNA, 72 bp, Homo sapiens
tttcttctagcacagtcagctctgttcctaaccctcgccatctactgggcatttttattcatatgcttgatc

SEQ ID NO: 2668 - DNA, 72 bp, Homo sapiens
gccccgaacagcagcagcagcagctgcagagcctccgggagcaagtcaggaccaagaatgagcttctgcaaa

SEQ ID NO: 2669 - DNA, 72 bp, Homo sapiens
tgctgtagtgatcttttctgagtgtctcctacttgcgacaaggtggacttgggaggaaagccgtctgccaaa

SEQ ID NO: 2670 - DNA, 72 bp, Homo sapiens
tcttggaatccagacttctttgctttcgccatcaccgtcatcaaagtgggaaatgcacacttactgttaaaa

SEQ ID NO: 2671 - DNA, 72 bp, Homo sapiens
cctgtccttttctgcctctctctcctgttcctccccgtcagtcacagccaccgaggaacacttctaagcatc

SEQ ID NO: 2672 - DNA, 72 bp, Homo sapiens
gagggcacatgtgactgaatgggtgatggcgagcacgcctgtgaatgtgtgaatctgagtgtctatgggagc

SEQ ID NO: 2673 - DNA, 72 bp, Homo sapiens
gtctattgcgtgccaggccactgtgagggtggttacgatatgtggatgaacaaaatgtggcctatgatttca

SEQ ID NO: 2674 - DNA, 72 bp, Homo sapiens
tgcttcaggtttccccatttgaaccagataccagtcgggttaccggatgtttgcttaaaatgagtcataggc

SEQ ID NO: 2675 - DNA, 72 bp, Homo sapiens
gtctgggccttggggcttcggaggctaggggctgccgagggatttaccacctccctccaggtcaccaggaaa

SEQ ID NO: 2676 - DNA, 72 bp, Homo sapiens
tggggtgagcgaggccccgggccactgtggcttctcgctccagctctgtgtgtagggttgtttgagcccctg

SEQ ID NO: 2677 - DNA, 72 bp, Homo sapiens
cggggcctggtagcggaagacctttccctctgaggcgcccctctgttctctgggggcggccacactgtgggg

SEQ ID NO: 2678 - DNA, 72 bp, Homo sapiens
agctgctggaactgtgggattgttttggagatggtcggctacctcaggaagtgaagactgtgatgttcaaac

SEQ ID NO: 2679 - DNA, 72 bp, Homo sapiens
gctacctccgagcttggcgcgagccggagggctcccgggaatgccctccccgccattttcgccgatgagctc

SEQ ID NO: 2680 - DNA, 72 bp, Homo sapiens
ttaacagataccaggaaccaagatcaccacacacacgcaatataatgatgaaatttcatgttcaaatcacat

SEQ ID NO: 2681 - DNA, 72 bp, Homo sapiens
gccctgggaggcgcggctcccgctgacacagcacgcgtgcccaccccagggacatgagtcacagcaccaggc

SEQ ID NO: 2682 - DNA, 72 bp, Homo sapiens
aagaaactgtccaagtagttgctgtggcattggcccgtgagctgtcatttagtgaggagccctaacattatg

SEQ ID NO: 2683 - DNA, 72 bp, Homo sapiens
cacgtccagcagaaagagctgcacagtggcggccgcgcgtcagaacggcagctgtggggtggctgtggagcg

SEQ ID NO: 2684 - DNA, 72 bp, Homo sapiens
ttgggcttacagaaaaaaagagagaggagagagagcgagagagcgaacagtaaactctgctgtgcagtcaac

SEQ ID NO: 2685 - DNA, 72 bp, Homo sapiens
gggttacaccactgcactcagcctgggtgagagagcgactgctgaaccttgggcaactcttgctgattcttg

SEQ ID NO: 2686 - DNA, 72 bp, Homo sapiens
tctgcatccctcaatcatgcttctgagtctcctgtcgacagttgccacctccttcctgacacactgccccag

SEQ ID NO: 2687 - DNA, 72 bp, Homo sapiens
ggaggtcagctgcaaacatttacgttgtgcaacatcgtgttcctctcattccagccccattcctttccaata

SEQ ID NO: 2688 - DNA, 72 bp, Homo sapiens
gtttgtctgtgctgttgtgtgttgcaaggcttttgcgacacaaaccagaccctgtcaccgcccgacttccct

SEQ ID NO: 2689 - DNA, 72 bp, Homo sapiens
tgatgaattctagatatttttctgccttgcatagacgcagaggtagcttttaaccatctggaaatgttacat

SEQ ID NO: 2690 - DNA, 72 bp, Homo sapiens
atatatatatttttcccagtcctttttttaagagacggtctttattgggtctgcacctccatccttgatctt

SEQ ID NO: 2691 - DNA, 72 bp, Homo sapiens
tgttgccaacaactgatcacccatcagaaggcgtccggtgactcacccccaattctgaacctcagtcttggc

SEQ ID NO: 2692 - DNA, 72 bp, Homo sapiens
agcctggtcggccgacgtcacagtggatggccctgcgtggctgggacacagacagggagcaggcatggcacc

SEQ ID NO: 2693 - DNA, 72 bp, Homo sapiens
tcctttgcagattctgactcaacttccatatctcacgatgaagtctgggctcagtcctgatcactggcctgg

SEQ ID NO: 2694 - DNA, 72 bp, Homo sapiens
aaggccagctgttttccattgtagtgcctcggaaacgcatgccctcaccactacaaattctggctgtgtaaa

SEQ ID NO: 2695 - DNA, 72 bp, Homo sapiens
ctatcttgtatccagaagccagtgacgaccatggccgtgatggcaccattgcatttaccacttcctgtttcc

SEQ ID NO: 2696 - DNA, 72 bp, Homo sapiens
agtggagcccgtctgttccttctggggtgtgcgagcggggcctcggggagcaggtgcaggacagggcacagg

SEQ ID NO: 2697 - DNA, 72 bp, Homo sapiens
ggacaccttctgggaaatgtgtcatcaggcaatttcgtcattgtgtgaacatcacacagtgacttacacaaa

SEQ ID NO: 2698 - DNA, 72 bp, Homo sapiens
ctcgatggtgacctggaggtcggtgaggtcctcctcgttgggaaagaccttgatgccatcgggtgggtctgc

SEQ ID NO: 2699 - DNA, 72 bp, Homo sapiens
cttctaggactgccaggaggcacagaagtcatgaacgtttgcagtttccagtcccaggcaaaatctcagttc

SEQ ID NO: 2700 - DNA, 72 bp, Homo sapiens
tgcaccaatggctggatccaggcacacgcaggctccgagttcacagaagcagggccatcatgtcccggctgt

SEQ ID NO: 2701 - DNA, 72 bp, Homo sapiens
gcagaggaggtggcgagaaatggctggattccaggcgcattttgcaagtgcagctaacaggatttcctgaca

SEQ ID NO: 2702 - DNA, 72 bp, Homo sapiens
atttactaattagtgtaacttgtttcattctcacccgctcaccttgatacctctccctactgtcttgtgatc

SEQ ID NO: 2703 - DNA, 72 bp, Homo sapiens
tcggaccgcctctgaccccagccacgcagcctggccgagccccccaccagactcccccgccagtgactcaca

SEQ ID NO: 2704 - DNA, 72 bp, Homo sapiens
ttgggtttagaaccttttaaccactatgacacatgcgtcctgtgtgttgctggtcactgtgggccctgggat

SEQ ID NO: 2705 - DNA, 72 bp, Homo sapiens
cagcggtcactgctgaagacacagaaacagcttcccgtgttcttggacttgacatcaaagatggaacgggga

SEQ ID NO: 2706 - DNA, 72 bp, Homo sapiens
ttaagactggctttcttgaatacttaaatatagctcgaatcactggttagatatggacatattttcccaact

SEQ ID NO: 2707 - DNA, 72 bp, Homo sapiens
agaatactgcagagctggctcctgaaggaagctgccgagtcaggctggccctagaagcatgctttctgggtt

SEQ ID NO: 2708 - DNA, 72 bp, Homo sapiens
ccctagcagcttcccctgaggggcccagtggtccccgtgggagcacagttcgaaaagctctgagtcacgtca

SEQ ID NO: 2709 - DNA, 72 bp, Homo sapiens
tccgctaggacggagagcctgtgcctcaggggctccgctccctgcaagaggggctctgcgcagcgccggcca

SEQ ID NO: 2710 - DNA, 72 bp, Homo sapiens
gagcgctgcccccactgcatggctgcagggaggcccgagggcaggatcttcccaagggacaagctggccatg

SEQ ID NO: 2711 - DNA, 72 bp, Homo sapiens
tccctcccacacagacccaagcttctgtgtggaagcgtgaacctcagacacttagacgtctccagttccttc

SEQ ID NO: 2712 - DNA, 72 bp, Homo sapiens
tcgagcaccccaggcagggaactcataacttcccacggcatcccatttccttgttgagcaagtgaagatcta

SEQ ID NO: 2713 - DNA, 72 bp, Homo sapiens
gtgaccttcgctgtggctgttcctggggactctgccgccacctcttcccctaacgcctccgcgtgtgaatcc

SEQ ID NO: 2714 - DNA, 72 bp, Homo sapiens
cagggcagcaccctcctgtgtttgatggaggggaacgtgtcttcacaggcacagcgctctcccctgggaatt

SEQ ID NO: 2715 - DNA, 72 bp, Homo sapiens
ttctccctgctgctgtcactgagctccacgctgctcgctctggacccgagacagctgctcggcgtgtgtgtg

SEQ ID NO: 2716 - DNA, 72 bp, Homo sapiens
ggcccaccggagaccgggccagactcaccccagagcgccaggggactggtggtgtacagatacactcgggtt

SEQ ID NO: 2717 - DNA, 72 bp, Homo sapiens
attggagttctcaaattgctccccccacccccacccgcctcgagtttatttaagtgacatcaagggattaga

SEQ ID NO: 2718 - DNA, 72 bp, Homo sapiens
aactacagatggtcaaaggccgtggcagtggtgggcggtgcactcggccttgatgtggaactgtaataatat

SEQ ID NO: 2719 - DNA, 72 bp, Homo sapiens
tcgccatctttaagggtagcagttaattttgtgaacgttatctctgcctgcgtggagggttgcagtgagaga

SEQ ID NO: 2720 - DNA, 72 bp, Homo sapiens
acactgggtgatgctgatggaaaaacagatccttgcgattgtagcctggaaccatttcacagaaggatctgc

SEQ ID NO: 2721 - DNA, 72 bp, Homo sapiens
ggtgaaggaagtgaggagttgttcaatcaatataacgattcagttacacaagatgagtaagtttttgggatc

SEQ ID NO: 2722 - DNA, 72 bp, Homo sapiens
taagggaatacaatagtccccaccattctcatcgccgtggtttcagttacctatggtcaaccacagtataca

SEQ ID NO: 2723 - DNA, 72 bp, Homo sapiens
tttgtactcatctgtttggtatgtgaggggttttgcgttttgtcttctgctctgtaatttaaagggataaaa

SEQ ID NO: 2724 - DNA, 72 bp, Homo sapiens
atacaaagcacctagaactctaatccacagttggccggagtgtagacccattcactcatgttgggaaacggt

SEQ ID NO: 2725 - DNA, 72 bp, Homo sapiens
agggaaaggtttggatgaattccttgctagtgttgcggcagttagaagttgatggatgcagactccaggtct

SEQ ID NO: 2726 - DNA, 72 bp, Homo sapiens
gtttctggcctctgtgatctcccctgggaacaggacggggaccgggccgcactccagcctgcccttcgtgag

SEQ ID NO: 2727 - DNA, 72 bp, Homo sapiens
cttagtctgaggttcctgtgccccaagtcacccaccggagagggagagaagcggcagagcccccacttccag

SEQ ID NO: 2728 - DNA, 72 bp, Homo sapiens
ctgatgacatgaaattgctttgtcattatgagtcacgattttaaacatttttactactacagagtgtggtca

SEQ ID NO: 2729 - DNA, 72 bp, Homo sapiens
tcttaccacaccagctgcctgtgtggcacagtgcccgtaggcacctagtgcaatcttcccagtggtcagtgt

SEQ ID NO: 2730 - DNA, 72 bp, Homo sapiens
tcagtccaaagtgattgggggagcaaaactacttacgagccccaaggactgccagcgttgatgtgtggagca

SEQ ID NO: 2731 - DNA, 72 bp, Homo sapiens
tgtggctggtggcagggtgactcatctcgggccttcggtcacagcctcaaattcctgtgccagagcctggcc

SEQ ID NO: 2732 - DNA, 72 bp, Homo sapiens
ttaccccttagctcctgagtttaagtccacgtttacgcccaaccacactcttcacggttcaacgctccaccc

SEQ ID NO: 2733 - DNA, 72 bp, Homo sapiens
cgacatctggccaagatctgttatttttaacaaaacgttctgtgttttcttcacaattttccgtttttaggc

SEQ ID NO: 2734 - DNA, 72 bp, Homo sapiens
gctgtctggatacctgctcctgactgctagctcttcgcccacctcacctgccacctgtcctttggcgttggg

SEQ ID NO: 2735 - DNA, 72 bp, Homo sapiens
tccctggggggttgggctcgctggccttcaggccacgctgctgccctctccactgtgcagacagtaggtgtg

SEQ ID NO: 2736 - DNA, 72 bp, Homo sapiens
ataattgatgaggtaacaataaataactagtacaacgctgaaagaggagaaggtatataggacttttctcca

SEQ ID NO: 2737 - DNA, 72 bp, Homo sapiens
aacggcagctgtggggtggctgtggagcggggcgccggcggtgggttgtttaccacgagctctacaaccagt

SEQ ID NO: 2738 - DNA, 72 bp, Homo sapiens
gcctgtgtgtttcaggctgggagccaggcttggggcgtggagcagaagcagagagaggtgggcatgccaggg

SEQ ID NO: 2739 - DNA, 72 bp, Homo sapiens
ggaccacgtggcctaatggataaggcgtctgacttcggatcagaagattgagggttcgaatcccttcgtggt

SEQ ID NO: 2740 - DNA, 72 bp, Homo sapiens
tcgtattacaaagctgagaggaagaagcgaagaaacgaagagctctctcaagaaagatcagagaaagctgtg

SEQ ID NO: 2741 - DNA, 72 bp, Homo sapiens
ggccatgaacaataaacagacaattaattatccttcgcggagctgcgcgggggcagctctcccaaagcagtc

SEQ ID NO: 2742 - DNA, 72 bp, Homo sapiens
ccacagggcctgccaagcctcaattatctgtgctccgaccctttaagaaacacttctctcacccctgagcta

SEQ ID NO: 2743 - DNA, 72 bp, Homo sapiens
aaacaagagaacaatgatgggctatcattcaactacgcctacagcttaagaggtgagctccctggtgattga

SEQ ID NO: 2744 - DNA, 72 bp, Homo sapiens
agcagggacggccaggaaagctgggacagctgcggcgtgcagagggccagcgccacaggcttctggactgtg

SEQ ID NO: 2745 - DNA, 72 bp, Homo sapiens
tgggactaccacaggaggcgcttttctcacctcaccggccttggagtcacagcgggggcctcagccgcggcg

SEQ ID NO: 2746 - DNA, 72 bp, Homo sapiens
tctgagggaagtggtgtgtttgctctctaactgggcgactgagggggacgagtcacaggaagtccaagaagg

SEQ ID NO: 2747 - DNA, 72 bp, Homo sapiens
gcatgagtcagctgtgagggctgatggcacaccaccgaatactctgctgtggcgccactagcctccatttac

SEQ ID NO: 2748 - DNA, 72 bp, Homo sapiens
taaattaatgatgagtctcaagatcacagctttttcggagcacatgtggtcctgggcgccacactacgcttt

SEQ ID NO: 2749 - DNA, 72 bp, Homo sapiens
actggaaaatagccacagctgccttcccagctttgcgtcacagaaagttaattacttgttgcatcatcagca

SEQ ID NO: 2750 - DNA, 72 bp, Homo sapiens
gcaggcccagctggagaggagcagcgggggccttgcggcagggcaggaagagacatgtaagctcccactctg

SEQ ID NO: 2751 - DNA, 72 bp, Homo sapiens
tgatgtggagcttccatcccagcagaagagagggacgtgcgtgggttccagagtcatgctatatcatcacaa

SEQ ID NO: 2752 - DNA, 72 bp, Homo sapiens
acagagcaagctggtgtcagagcctggacctacagcgctgttggtggaggtcctgcctccaggtaggggaag

SEQ ID NO: 2753 - DNA, 72 bp, Homo sapiens
ggcagggatcttattccaccttctgaagcttctgtcgaaccagttgtaaggagaatggagagagcagtgaga

SEQ ID NO: 2754 - DNA, 72 bp, Homo sapiens
gttctcagaggacaccagcacaggtggctaagatccgagctgcttcctgcagcgtcaccacaccggcgaccc

SEQ ID NO: 2755 - DNA, 72 bp, Homo sapiens
catcagctcccaaagttgccatctaagggcaagttcgcagagaacactgaagcccattttgtccaagcacgg

SEQ ID NO: 2756 - DNA, 72 bp, Homo sapiens
gcaggcctgtgacccagcctggagcgctgatgtggcggctgtggtcatgcaggaaggcctcgcccatatctg

SEQ ID NO: 2757 - DNA, 72 bp, Homo sapiens
cccgggctccaggaaggcctgcacatacggctcagcgcactcatccgtgggcaccgtgcctgctcactgagg

SEQ ID NO: 2758 - DNA, 72 bp, Homo sapiens
ctggaactctgtaccttaaagtgagaggccgctgccgggggagaagggctgggccattcggggaagtctccg

SEQ ID NO: 2759 - DNA, 72 bp, Homo sapiens
cctgggttggccacagcccccatggtggtacagaacgcatgcagggcggttgccctgtcctttgaagactgc

SEQ ID NO: 2760 - DNA, 72 bp, Homo sapiens
aaactgcccaatgattacaacattgattcaactgacgaaaaatacaacttttcagaccacgactaaacattg

SEQ ID NO: 2761 - DNA, 72 bp, Homo sapiens
acccttggccagcagttgcaagtccaaacaggcttcgcccacattccctggctgctctccagcccgcagcag

SEQ ID NO: 2762 - DNA, 72 bp, Homo sapiens
cacaccatctagtcataccctgtttcaaaatcaagcgtgcagatctgtaggtcacagaatacactttcctcc

SEQ ID NO: 2763 - DNA, 72 bp, Homo sapiens
aatgctggtcaggacccactgggttggaccagggccgagcaggctgctgcgccgtttctaatgtgtcttctc

SEQ ID NO: 2764 - DNA, 72 bp, Homo sapiens
acaggaaagacctgaataagaccctgaattggctgcggtgctcctgggtctcttcaggtggagatgtgtccc

SEQ ID NO: 2765 - DNA, 72 bp, Homo sapiens
gccaggcaggaggggccgaccagccttggggacagcggtgcgtgcgctagtgcccgcacccggtgtgtagaa

SEQ ID NO: 2766 - DNA, 72 bp, Homo sapiens
tcctccctcaagggaaagggccgcagctgaaaggccgggagcttcttgtgtttttgtgggtgtttaatttcc

SEQ ID NO: 2767 - DNA, 72 bp, Homo sapiens
aaccaggcaggcaagcagacatccccacggagcagcgttgggcccccaaggtgcctgacccacttcctagag

SEQ ID NO: 2768 - DNA, 72 bp, Homo sapiens
gctcagaagatagcatcccctcctaaggaacttgccgcctctcagttgatctccccagggagagtgtggcag

SEQ ID NO: 2769 - DNA, 72 bp, Homo sapiens
taaacaggggcagccctggggatagttctccagaacgtgagggcagacacaggatgcagcaggtctgggctc

SEQ ID NO: 2770 - DNA, 72 bp, Homo sapiens
gacactggtatgcagcattgaacaagaaaaacagacgaggtcccagctcatttgcagtttgtatgcagcggg

SEQ ID NO: 2771 - DNA, 72 bp, Homo sapiens
accccagagggagagatgtaagccttagagaaaggcgactcctggcctattcagcagttggggacactcctt

SEQ ID NO: 2772 - DNA, 72 bp, Homo sapiens
gtctgccaagagagatctgtgaagtttcccatcaccgtggcagtccacaatgtgaagcccctgaggccaccc

SEQ ID NO: 2773 - DNA, 72 bp, Homo sapiens
cacccaggcccaacatgttgtgagttcatgtacaccgaccattttgctatttcttttctatatgtcactttt

SEQ ID NO: 2774 - DNA, 72 bp, Homo sapiens
cacctgatattgtcagctcctcttagctcaatctgcgcttttatgtcctctaagctgggggtggggtgaggt

SEQ ID NO: 2775 - DNA, 72 bp, Homo sapiens
tgctttagcctctgggcaggaaggctgatgttctgcgacaaacatcctggctgggaaatcccctggcccgta

SEQ ID NO: 2776 - DNA, 72 bp, Homo sapiens
cctctgtgctctgggaaggctgaggaaggggacggcgagacctcagagggataggacagaatttatgtgaac

SEQ ID NO: 2777 - DNA, 72 bp, Homo sapiens
aacaggaaatgtttatagttaagaaatttgtggtgcgtcacttaagcaaaggtgcagatacaaaaatgagcc

SEQ ID NO: 2778 - DNA, 72 bp, Homo sapiens
ggggccagagggccagacagccacagagctcctggcgtgggcaaggctggccaaggatggcgacgcccaggg

SEQ ID NO: 2779 - DNA, 72 bp, Homo sapiens
aaaagaaagcgcccctatccccagcaccgctttggcggggtgtgtggctagagacaaccaaggaaaattcgg

SEQ ID NO: 2780 - DNA, 72 bp, Homo sapiens
tggataacaaatataccccgtggttctaatatcagcgtcctattcctcctcccaaggaactagtgatagcgc

SEQ ID NO: 2781 - DNA, 72 bp, Homo sapiens
atgtgtatgcataaacagatataattttgtttgctcgcttatttggttcgtcgcctcactagattccggact

SEQ ID NO: 2782 - DNA, 72 bp, Homo sapiens
agttgtttttagcaaccatcatttccctgtcttaacgtgacactacttctgaacctcaaacactgaaactag

SEQ ID NO: 2783 - DNA, 72 bp, Homo sapiens
gattgggctgcccagaacaaagctaggggctagaccgccccctgcagaaccgccctgtctccagagggtcaa

SEQ ID NO: 2784 - DNA, 72 bp, Homo sapiens
cttcttggttcagctcaggactctgagggttgctgcgtggaggcagtgcatgccctgggcacagtgcccagt

SEQ ID NO: 2785 - DNA, 72 bp, Homo sapiens
tttggtgtccaactctcaaacactctagctgtgaacgtatgggcctaaacttgtcctgtgtgaaagacgtgt

SEQ ID NO: 2786 - DNA, 72 bp, Homo sapiens
tgcgctgcttcctgcagctctgactgagggtcagacgtcagaagggacttccagagctggggtctggctctc

SEQ ID NO: 2787 - DNA, 72 bp, Homo sapiens
tctctaagccttcctactggaaggttgggatcctccgttttctcgctctgagacagcacgtcaaatgctaat

SEQ ID NO: 2788 - DNA, 72 bp, Homo sapiens
ttagccaaaatcatatagctagttagcagtagagccgagactcagaaaaaaacaaagtaaaacaggcagact

SEQ ID NO: 2789 - DNA, 72 bp, Homo sapiens
gctggagcgtgactcagccgtgcccagcatggcggcgcccttctctgcccagggattctcacccacacccac

SEQ ID NO: 2790 - DNA, 72 bp, Homo sapiens
aaagaaagtcacatgcttgctccacaaagaatttgcgtgagggaagtgaacaatttgatgagaaaaaaatag

SEQ ID NO: 2791 - DNA, 72 bp, Homo sapiens
caagagctggagctgtcttttccttcctgcacagccgcagagcaggtggatggggctgcttccctgcaaggg

SEQ ID NO: 2792 - DNA, 72 bp, Homo sapiens
gagttcttatcaccactctagtaagggagggccctcgtttcacagatgaggaaactgggctggaatggggtg

SEQ ID NO: 2793 - DNA, 72 bp, Homo sapiens
ccatgggaatacaggtttctgttctttggaggcaccggagaaactaggagttcggtcagcaccttaaggcgc

SEQ ID NO: 2794 - DNA, 72 bp, Homo sapiens
gtggagaggatgaggttgagggaggtggggtatctcgctgctctgaccttaggtagagtcctccacagaagc

SEQ ID NO: 2795 - DNA, 72 bp, Homo sapiens
gattgtggagcctaacagactgaaagctttctggacgttggaatgtttttgggaggagcctcaatgccacac

SEQ ID NO: 2796 - DNA, 72 bp, Homo sapiens
caggtgtcctggttggatcgtgggtggtgcttgtccggctgcctcaaggatccagcctagggacatgttctt

SEQ ID NO: 2797 - DNA, 72 bp, Homo sapiens
gagaggagagcgtgctggtgacagatataacatcgcgtgaggcatcacaagagttagtaagaaccaggtcac

SEQ ID NO: 2798 - DNA, 72 bp, Homo sapiens
tttttttccttatttttccctattccagtcatacacgtggacctaactgcaccagtagcttttctgagaata

SEQ ID NO: 2799 - DNA, 72 bp, Homo sapiens
tgcaaaaggctgcagatcatatgattccattcatacgaaatgcccaggacaggcgaatccagagagacagac

SEQ ID NO: 2800 - DNA, 72 bp, Homo sapiens
tctgccagcggcctcccctctgagcctcagtaagacgctccttgacctgccctgactttctccgtgcctttg

SEQ ID NO: 2801 - DNA, 72 bp, Homo sapiens
atcaatggctctacctgaaaccaaaaagagctccccgcagccccagccagaagtgactcagtaagcaggacc

SEQ ID NO: 2802 - DNA, 72 bp, Homo sapiens
gcgtgtgactagctgtgcgtgtccaggttttcacccgaggcagtggttggcaaactacagcccgtgggctaa

SEQ ID NO: 2803 - DNA, 72 bp, Homo sapiens
ggcgggaaggcagccagtcccaggaaggcagcaggcgcactgcctggggccctgccttcctcctccgggttc

SEQ ID NO: 2804 - DNA, 72 bp, Homo sapiens
ggtggctccggggcctggctctgaaaaggatggcccgcttctgcccagacgctgccctggtcacgctcacag

SEQ ID NO: 2805 - DNA, 72 bp, Homo sapiens
ctctgcgcttctctacttgggctggaggcagatcccgcccccaccccccaccacaccttcccctgaactacc

SEQ ID NO: 2806 - DNA, 72 bp, Homo sapiens
ttaatcatgctgagcctcattttctcctgtgacctcgcttggcctaccccacaggactgcgatgacagccga

SEQ ID NO: 2807 - DNA, 72 bp, Homo sapiens
acgccgggccaccactacctttcccaacaatggcccggtgtgggcagcccagtgactcagatcctgtccata

SEQ ID NO: 2808 - DNA, 72 bp, Homo sapiens
tgctagctctgacttggtcgaggtgcagttcccagcgtggccttaaatggctgccgcccggtgcgcgaactt

SEQ ID NO: 2809 - DNA, 72 bp, Homo sapiens
tggggtagttatttgttaactatggacacagtgaacgtagtttacgatcttgaaatgaaacttagatttttc

SEQ ID NO: 2810 - DNA, 72 bp, Homo sapiens
caatatctcgactgcaaagcttctcttactgttggcggatagataatgacatagcccagtcattatcaccgt

SEQ ID NO: 2811 - DNA, 72 bp, Homo sapiens
gcacaaaggtctcccgccgaggactgggcttcactcggcgaggccccaggccctcgcctgcgctctcccgat

SEQ ID NO: 2812 - DNA, 72 bp, Homo sapiens
ccaccactgctagcagtttcttgcgtattcttccacgtaggctaagcagaaattgtgtgtttgtgtccttcc

SEQ ID NO: 2813 - DNA, 72 bp, Homo sapiens
tatcttaaaattgtattgtggagttttccagaggccgtgtgacatgtgattacatcatctttctgacatcat

SEQ ID NO: 2814 - DNA, 72 bp, Homo sapiens
acactggggattagcttttctgtgtgtgaaggccgcgatgctgacgattgtgtcagagttgtggtggaatga

SEQ ID NO: 2815 - DNA, 72 bp, Homo sapiens
cagtcatgacgcacctgtaaactggctgcatctcccgggctatgccgatgatggcgcctggcaggaaactgt

SEQ ID NO: 2816 - DNA, 72 bp, Homo sapiens
caggcgctggcctcaataatcccccagccgcgggccgatttggcatcctccgacccctgcggccactgccag

SEQ ID NO: 2817 - DNA, 72 bp, Homo sapiens
tccccacagcagaagaggtctgaggatcccagagccgttcttccacaatctgcttcttcaaatttcagttaa

SEQ ID NO: 2818 - DNA, 72 bp, Homo sapiens
tggaggcttcttggaggagggtccagggcctgtcccgcccctgttcctgcctgcaggagttgtttactcaga

SEQ ID NO: 2819 - DNA, 72 bp, Homo sapiens
agtctcgccctgtcgcccaggctggagtgcagtggcgcaatctcggctcactgcaagctcggcgtcctgggt

SEQ ID NO: 2820 - DNA, 72 bp, Homo sapiens
ggcctgtggggcttgaaggaggggaacagaggcagcgtccatttgttctgtaagggccgggagaccaggtgg

SEQ ID NO: 2821 - DNA, 72 bp, Homo sapiens
acggttcaaaccaagatactgtatttcagacatttcgtaatcaaaatctggttttcagtggccattgagaaa

SEQ ID NO: 2822 - DNA, 72 bp, Homo sapiens
aatgacattcatgtgaaagcggtgaggtttgaagacggtctgtaggtcagtcaggagtgccgtgtcattgtg

SEQ ID NO: 2823 - DNA, 72 bp, Homo sapiens
gcggggcggcggtggcgattggacttggtgggtcccgggccaggggcgggcgccgccatgggtaacctgttc

SEQ ID NO: 2824 - DNA, 72 bp, Homo sapiens
gcccgacctccctggcggacagccaccgctagccccgtgccttctgctggttgggtccgcagggacaaaact

SEQ ID NO: 2825 - DNA, 72 bp, Homo sapiens
ctcgcaggcgctggcaggcgggcagggcctcagggcgcggggcaccctggccaccaggccgtcggccacttg

SEQ ID NO: 2826 - DNA, 72 bp, Homo sapiens
cacaataaagcagtcctgttcaaatttttttttaacgtggcttgtagaatttttaaaaaagtgatcttaggt

SEQ ID NO: 2827 - DNA, 72 bp, Homo sapiens
tttaaatcagctttgacttgggtctgaaagtaacccgtgacagcagtaagcctctcgatctgttgtttgcag

SEQ ID NO: 2828 - DNA, 72 bp, Homo sapiens
taaaactctttataaatgtgtaatataataatagccgtttcattattgtaaataaccagctctaggggcagg

SEQ ID NO: 2829 - DNA, 72 bp, Homo sapiens
ccctgcagagcatgggacgcttcctgccatggtgccgtggcaatgggtggcacctgcctgtggccccttctc

SEQ ID NO: 2830 - DNA, 72 bp, Homo sapiens
tgcgccagctctctaggatgctggccaaggtcccccgcacttggccggatccaggcagggagtgacggacct

SEQ ID NO: 2831 - DNA, 72 bp, Homo sapiens
aagttgcctccctctctgccagcacctgccaggttcgtaaacttgcctcaagctgtttttgcttccctctgg

SEQ ID NO: 2832 - DNA, 72 bp, Homo sapiens
gcacatgataggcacaaggtgaatgagtgcctggacgcatgcagggacttgggtacctgaaatgatgattct

SEQ ID NO: 2833 - DNA, 72 bp, Homo sapiens
ctcataatctggcttgctgacccctcccataccctcgttcctcaggcctagccagggcctagcccgcggcag

SEQ ID NO: 2834 - DNA, 72 bp, Homo sapiens
gcaaccagctatgtgaccttgctcaggtccatctccgggtgtcagtttcttcatctacaatgcaagagggtt

SEQ ID NO: 2835 - DNA, 72 bp, Homo sapiens
tgtggtgtgtgactaagagttagggaagaagtaagcgacagagccttccagtgccttgcaaattgtaagact

SEQ ID NO: 2836 - DNA, 72 bp, Homo sapiens
gcggtggctgggcgcaaaggtcccgcagtgggccacgcaggcaccgggctgacctggcaaaactttggcgtc

SEQ ID NO: 2837 - DNA, 72 bp, Homo sapiens
agccatcagctgctggccctgcccgggtgcccacccgatgtcgacctcatctaaaggcaaggccccatctca

SEQ ID NO: 2838 - DNA, 72 bp, Homo sapiens
gcgatggagagcaggcgacaccgagggtgtccatccggtccacccaacctggtgcaaggctctgggaagcgc

SEQ ID NO: 2839 - DNA, 72 bp, Homo sapiens
ttttcctggtgcttgaagcttccattgttgcagtccggatgctgggactccagccccaagcttcctgtcctg

SEQ ID NO: 2840 - DNA, 72 bp, Homo sapiens
gatgatgccactgcactccagcctgggctacagagcgagacacggtctcaaaaaacaaatgtgtggctaagg

SEQ ID NO: 2841 - DNA, 72 bp, Homo sapiens
attcctgtctctcggtttcttttttcccttcccttcgctgccttcccctccctcttccctttttctttccaa

SEQ ID NO: 2842 - DNA, 72 bp, Homo sapiens
aaggaaggagaaggaaaaggagggaggaaggaaatcgtgtaattgcagaaagtttatgtctgggacccttgt

SEQ ID NO: 2843 - DNA, 72 bp, Homo sapiens
tcctcgcacgtgaagcacttccccatctgcatcttcggacactccaaggccaccttctagccccacccacca

SEQ ID NO: 2844 - DNA, 72 bp, Homo sapiens
tcaagtgtggcatgccaaagattctagatgacacacggactgagaattcaataatgctgagtcatataatga

SEQ ID NO: 2845 - DNA, 72 bp, Homo sapiens
aggctgcactaacaaaaacctcaagacttcagtggcgtaacagaacaaaacttgacttctcattcatgtgac

SEQ ID NO: 2846 - DNA, 72 bp, Homo sapiens
atcgttaatccaacctccaaccacaagtttcaacacgtgttctctgggcaagtcggttgccccaagtgatag

SEQ ID NO: 2847 - DNA, 72 bp, Homo sapiens
ttgccagtgtcatcatgtggtaattgggaagtttccgtgaaccgctgcagcagggagtttaaagaagatcag

SEQ ID NO: 2848 - DNA, 72 bp, Homo sapiens
agttacggagccacgttgctttgctgggtctgagccggggtgtgacgtagtccctgcagctgccaacggttg

SEQ ID NO: 2849 - DNA, 72 bp, Homo sapiens
aatgggacctgaaaattccatgataaacacaaatacgttattactctaaggaacaatttgttgtttaaaact

SEQ ID NO: 2850 - DNA, 72 bp, Homo sapiens
tcacgtggtcctgttcgggggaggcaatgaggcaccggcggctctgttgctgctcccggagattaatgaggc

SEQ ID NO: 2851 - DNA, 72 bp, Homo sapiens
tactgttcaaggaaatggtttaaatggggctgccacgtggttatgtgtctgtcacgagaggcttgttaagca

SEQ ID NO: 2852 - DNA, 72 bp, Homo sapiens
tgttaatgaaccagctctgcctggaggctagagcccgcctgcctcatgcctaagtgtgcgtcattctgcctt

SEQ ID NO: 2853 - DNA, 72 bp, Homo sapiens
caagtcctctaaagtgttgcataaggcaaagataacgttaagtctgtggaggcttccgttatcgggaaaaga

SEQ ID NO: 2854 - DNA, 72 bp, Homo sapiens
gacctggccacatcctacatacatgtcagcttgcacgccatctacttaactgtcatgcacttgatagcaaat

SEQ ID NO: 2855 - DNA, 72 bp, Homo sapiens
gtatgcaataaatatcagccgtttggggccactaccggtctcctcctcttgatggtagtggtcccccgggcc

SEQ ID NO: 2856 - DNA, 72 bp, Homo sapiens
cagatgccacgtgcacatgcagcgagttgtgcaaccgagagaaacactaaactttggaattcactgcttcta

SEQ ID NO: 2857 - DNA, 72 bp, Homo sapiens
gtgcagaactgggatttttacccagttttgctgaccgccagagtccccagtgtcattgaccaccaaattatc

SEQ ID NO: 2858 - DNA, 72 bp, Homo sapiens
agtttccttaacgtattgcgtcaaagcgagacaaccgagtcttactcaaacttgttttaaccggagatggag

SEQ ID NO: 2859 - DNA, 72 bp, Homo sapiens
tgtggggaagaggccagcttcaagaacttccacaacgggagttcctgggaggaggaccctgaggccgacctg

SEQ ID NO: 2860 - DNA, 72 bp, Homo sapiens
acaaacaagtcaggaaatgctgcttacactgtatccgcattacacaatagccaacacttcacacaagacatt

SEQ ID NO: 2861 - DNA, 72 bp, Homo sapiens
agaacggggacctttctatttctgctctcagctgacgtggcgccaccatgtggtaactgcgttaagcaccag

SEQ ID NO: 2862 - DNA, 72 bp, Homo sapiens
ggggacgtcactgtgtccttggggaccgtgacgaccgcagtgccgacacagtgagccccagaatcgccctgt

SEQ ID NO: 2863 - DNA, 72 bp, Homo sapiens
cagccttggggctctgtactccccaggctgacatacggcgacctcgtgtttcggctttgctttcgcaatgca

SEQ ID NO: 2864 - DNA, 72 bp, Homo sapiens
acccaggaggcggaggttgcagtgagctgagattgcgccactgactccagcctgtgtgatggaacaagactc

SEQ ID NO: 2865 - DNA, 72 bp, Homo sapiens
atttatttctcgtggttttgtcagtccattacaaacggttgcaaaattgtggtactagaagggatcctagaa

SEQ ID NO: 2866 - DNA, 72 bp, Homo sapiens
acagtttcctagtgtgttctgtgatagagatctgacgaaatctggctgtttagagtgtggcccctcccgctt

SEQ ID NO: 2867 - DNA, 72 bp, Homo sapiens
tcctaatcttcacaagtgtcattggttatctagtgcgtcagcacagcacataagcctaggttcaaacctctg

SEQ ID NO: 2868 - DNA, 72 bp, Homo sapiens
tcatcatttcttattgcacaatttaatgaccatatcgccacctctggtctggtagcttcattaaacagggca

SEQ ID NO: 2869 - DNA, 72 bp, Homo sapiens
gaggcagccctgggggttaggattggcagagctctcgtggagacctgccatcgtgctgatccagagccacct

SEQ ID NO: 2870 - DNA, 72 bp, Homo sapiens
tgacagaggaagaagagttagaacagattctgaatcgttccgcctcagcaggaaggaaaccccgtccctgct

SEQ ID NO: 2871 - DNA, 72 bp, Homo sapiens
ccatttctctcaccacttctttgccagtctagatccgtcctggtgccttactgtgcatacagttctactcgt

SEQ ID NO: 2872 - DNA, 72 bp, Homo sapiens
caggccaccaccagcctaggtggctgaagaggtggcggtgccaagtcacttttggggagcctcttagtttat

SEQ ID NO: 2873 - DNA, 72 bp, Homo sapiens
tttcactttcacataattccagctgaacttggaaccgacttaaaaacaggatttgattcccctttcacttct

SEQ ID NO: 2874 - DNA, 72 bp, Homo sapiens
gagtactgtgaggagctcttaaaggtctgaaagcgcgatatggcagcctccagagtttgagagtgaaaggga

SEQ ID NO: 2875 - DNA, 72 bp, Homo sapiens
agttaaacctctttcctttataaattacccagtctcggcagttctttgtagtaatgtgagaatagactaagt

SEQ ID NO: 2876 - DNA, 72 bp, Homo sapiens
ttgtgcttccttgtggcggagggggccccccactccgcgggtgggtcgcgggggggacttgagcacccactc

SEQ ID NO: 2877 - DNA, 72 bp, Homo sapiens
tctgtacaaccaaatgaaggtacataatacaccctcgctttacagatgaggaaacttgagctcagagctcag

SEQ ID NO: 2878 - DNA, 72 bp, Homo sapiens
cagaaggtctgaggcaatgggggcaagcttggagccgacagtgctgagcaggcaggagccaagagaggggaa

SEQ ID NO: 2879 - DNA, 72 bp, Homo sapiens
aacagggaagtaatgaggctgacctgttgggtcttcggtgaaatgtgtatgaagagcttgacacttactaga

SEQ ID NO: 2880 - DNA, 72 bp, Homo sapiens
gctcgatcgcccgtggcgcctgttcctcagccgggcgccgcaggacccagcagatacacggtctgttgggca

SEQ ID NO: 2881 - DNA, 72 bp, Homo sapiens
tgttgattcagccccattcattgatgggctggggccgtgcgctgagcgcccacagtcgatggggaaaggggc

SEQ ID NO: 2882 - DNA, 72 bp, Homo sapiens
ccagcctcatttctctatccctctgagaacccagacgggcagagcctgggtaggagagcctggccccgctgt

SEQ ID NO: 2883 - DNA, 72 bp, Homo sapiens
ggatttcacaaggctttcaagggctgcccacctaccgggcacgatcttcatcggggacggtggcaggagccc

SEQ ID NO: 2884 - DNA, 72 bp, Homo sapiens
atccaaggaatgttctagaaccgtgactgcacagccgacctcctttcctttgctcggactcacctcccccct

SEQ ID NO: 2885 - DNA, 72 bp, Homo sapiens
cgcctctgggctgaaagcgccatcaggacccgtggcgcgtgggctttgttaagtcattaactgcttgggaca

SEQ ID NO: 2886 - DNA, 72 bp, Homo sapiens
atgaaggacttcttaccatcctgacgactgaaactcgagactccttccccttgctggatgtgttttgctttg

SEQ ID NO: 2887 - DNA, 72 bp, Homo sapiens
cgctcactgggattcccgctcactgggcttggtgtcgcggaaaaaacgaaggcagagaaagaattagaccac

SEQ ID NO: 2888 - DNA, 72 bp, Homo sapiens
tgtcccggttggctcttctttccttccttagacttcgcttttccagcggccggctcctgcccccccttctcc

SEQ ID NO: 2889 - DNA, 72 bp, Homo sapiens
gaagagaagaaaaccgtaaaatgaagcagagatgccggcctactacttgcacctggaatctgaagggggcac

SEQ ID NO: 2890 - DNA, 72 bp, Homo sapiens
agctccagccacccctaggaggagacaacatatcacgcatctcaagtgagtggctgtggggaggggcaagct

SEQ ID NO: 2891 - DNA, 72 bp, Homo sapiens
tggtggaaggtcacagggagccagtgtgtacacagcgagagtgggagcaaaagaagtggggagttccacact

SEQ ID NO: 2892 - DNA, 72 bp, Homo sapiens
accctccaacagacccaaccctgagtctagccccacgccctggaactcagaggggcaagccccgccccctgg

SEQ ID NO: 2893 - DNA, 72 bp, Homo sapiens
ctggccaagattacacggccagggaatggtggggccgcactttggatctgatcagtctgactccagaataat

SEQ ID NO: 2894 - DNA, 72 bp, Homo sapiens
ccatttccttgcaacttccccaataaagtgcttctcggtcttaccagtctcagattgcaccatcatttacct

SEQ ID NO: 2895 - DNA, 72 bp, Homo sapiens
atcacaacctccttcctcgtttatgtcaatacgttcgtcttcactaagttcctctgctgcacatgtggagcc

SEQ ID NO: 2896 - DNA, 72 bp, Homo sapiens
gcgtgctgtctgcagagtcgctttgaaattcctgccgcgtttttgcaacaggcaaagcccaagtcacgctac

SEQ ID NO: 2897 - DNA, 72 bp, Homo sapiens
cgagtcagctgggatccatgcagctggtggcttgtcggtggcaggccaaggcctgagtcatgtccccgtcac

SEQ ID NO: 2898 - DNA, 72 bp, Homo sapiens
agacctgggggagctggagacagaatccactccagcgggcgcatgtacgggctccctctggacccactgcag

SEQ ID NO: 2899 - DNA, 72 bp, Homo sapiens
ttaatttgtatatttcttgatgatgtgccggtaagcgatcaacaaacgcctgttaaaccaaacaggaagggc

SEQ ID NO: 2900 - DNA, 72 bp, Homo sapiens
tgggcccgccttgcccctttcaaggaagcagctgccgcgtcacacgctgcagcgcagtgctgcccatggttt

SEQ ID NO: 2901 - DNA, 72 bp, Homo sapiens
cgcacaggtaaggcagttctggctccagcgcacagcgccctcgggcgggcagcagcgcacggcctagtctgg

SEQ ID NO: 2902 - DNA, 72 bp, Homo sapiens
gggcccatgtgcctggctccttcctcctggctctgcggtgtttccacctgagaccctcccggtctcagcctg

SEQ ID NO: 2903 - DNA, 72 bp, Homo sapiens
ccttgcaccatttgccaagattttgggtttcacctcgtcttttccttcctgtgagatgtaataattgaggaa

SEQ ID NO: 2904 - DNA, 72 bp, Homo sapiens
ggctttcacagggatctccagggaaggtgggaagccgttcttgagaacgagaaaaatacggtggcccagcaa

SEQ ID NO: 2905 - DNA, 72 bp, Homo sapiens
agcaccagatctggctctgcaccccctaacgtagacgccagccgtgggtcccctttgtgtggaaaaagggac

SEQ ID NO: 2906 - DNA, 72 bp, Homo sapiens
gctggaaacctcaaccccaaagctacccgagggtgcggacagcccccagaggcaaccaacaatatttaaggt

SEQ ID NO: 2907 - DNA, 72 bp, Homo sapiens
tgtgttgatcctggtctggggtttcccatgaatgacgagcacttattccttggtgagcaaatgtcccaacgg

SEQ ID NO: 2908 - DNA, 72 bp, Homo sapiens
taacaacctagtgatcaaaactacagctgttattacggcagatacgcatgggccaacacctggtctctgggt

SEQ ID NO: 2909 - DNA, 72 bp, Homo sapiens
gggaagcgagaggtgtcataatctcaccaaggggtcgctagttgcccatgtggagcctggccacacactatt

SEQ ID NO: 2910 - DNA, 72 bp, Homo sapiens
accaagcccaggcggaccacgtcccaggcagaccacgtcccaggcggaccaagcccaggtggaccacgtccc

SEQ ID NO: 2911 - DNA, 72 bp, Homo sapiens
tgttattcagggaccatcgcagcgtgcctgtggctcgtctgggttctctgtttcgtgtgtgtttaactctgt

SEQ ID NO: 2912 - DNA, 72 bp, Homo sapiens
attggttcatattgctaatattttcctcattttcccgtgtccaccagcttacactaccacttaagtggtgac

SEQ ID NO: 2913 - DNA, 72 bp, Homo sapiens
gctgtgtgaactgactgtgaactcggggtgggggccgtccccaaatgtgtatgagtctctggctccccttgg

SEQ ID NO: 2914 - DNA, 72 bp, Homo sapiens
aggtagtaatgtggggctgggaaaggggattgaggcggagaaaatgcacaggaaggtggtatagtgtagcaa

SEQ ID NO: 2915 - DNA, 72 bp, Homo sapiens
tgcttaacggggggtcctgcggcaaagaaagtggacgggttgccacttctgtgcctccccatcaggtagcct

SEQ ID NO: 2916 - DNA, 72 bp, Homo sapiens
caagatgaaactgaccttccccacaacacaatgagcgtttttcaaatcctttcacaatcatcccttaagctt

SEQ ID NO: 2917 - DNA, 72 bp, Homo sapiens
taactttgtggccagtggccaaaccatcagggaaacgaattgccctccaacgtttacctctcctcggcttcc

SEQ ID NO: 2918 - DNA, 72 bp, Homo sapiens
tttgcatgtcccgtctcaaagcctcatgcaagccacgtgctctcttcccatctgatgagactgcagcgccct

SEQ ID NO: 2919 - DNA, 72 bp, Homo sapiens
gctaaggtcaccgtttcttttcactttgacttacccgcactgcagccggtggtggaagctacagggagcttt

SEQ ID NO: 2920 - DNA, 72 bp, Homo sapiens
aaagcccaactcccagggctctggaaatggtgaggcgaggggcttgagaggaacgcccacccacgaaggccc

SEQ ID NO: 2921 - DNA, 72 bp, Homo sapiens
tgggcagccccctccttcctcactcccactcttggcgtcttggtgcagccctaggccggccctgcccttcgt

SEQ ID NO: 2922 - DNA, 72 bp, Homo sapiens
cgggctccactcttctcagatgtgcagaggctcaccgggccctgggctcactgggctagccagaccctctga

SEQ ID NO: 2923 - DNA, 72 bp, Homo sapiens
cttcattagaggactgcagccaacgcagggccaggcggagggagccagagggaggcaggctctgctctccct

SEQ ID NO: 2924 - DNA, 72 bp, Homo sapiens
catttgaatcatttgatcctcaaatgggatgggggcgagtgggcggattctgaggctgcctttggaatgcgt

SEQ ID NO: 2925 - DNA, 72 bp, Homo sapiens
ccctttcctgttttgttcccacgtaattaccggtgcgtgcagcccccagtcacgtaccccctgcttgctcaa

SEQ ID NO: 2926 - DNA, 72 bp, Homo sapiens
aggctattgttcactctgacctccagctccttttccgttataattacccaatcaatactccctcatttctgt

SEQ ID NO: 2927 - DNA, 72 bp, Homo sapiens
gaggtctacgccacggacaaggatgagggcctcaacggggcggtgcgctacagcttcctgaagactgcgggc

SEQ ID NO: 2928 - DNA, 72 bp, Homo sapiens
ggctgcagcctcctctttctgtctctgatcagagccgacaccagacgtgattagcaggcgcagcaaattcaa

SEQ ID NO: 2929 - DNA, 72 bp, Homo sapiens
tccacaatgagggggtcagccggctcagggacccgcggactccccagagtgctccttcctcgacgaacacag

SEQ ID NO: 2930 - DNA, 72 bp, Homo sapiens
agaggtttcaacatcccagcctcctgtgtcccagccggcatctcatgggccctgtgccaccagcaagtccca

SEQ ID NO: 2931 - DNA, 72 bp, Homo sapiens
aggtaggctttctgctggtcagcctgcagttggcacgtggccacggaggtcaccgttgggcaggtcatagct

SEQ ID NO: 2932 - DNA, 72 bp, Homo sapiens
gcaccccgacttctctggaactactgacattttctcgcaagcagagaggaagatggaaaggtcagggaggag

SEQ ID NO: 2933 - DNA, 72 bp, Homo sapiens
cgctccagctttcctgctggggctaagttgacttccgtcattagttccgtctagacacttcaaagaatacag

SEQ ID NO: 2934 - DNA, 72 bp, Homo sapiens
cctggagacaatgggcaacaggggcattgggcctccgtccagcccccgccagcgccccagggtcacacatag

SEQ ID NO: 2935 - DNA, 72 bp, Homo sapiens
cacagagcatttccgggtggcttgtgtgtgcgctccggctgtcgagcagcaggacttggcttctgttcccgg

SEQ ID NO: 2936 - DNA, 72 bp, Homo sapiens
tggtagcagagacctggcattggttcaaatcaggtcgttttgctcttaaggccatgttcgttccaccaaaca

SEQ ID NO: 2937 - DNA, 72 bp, Homo sapiens
acattttgcaacacatattggaagaaaccagcctccgcagaaatcaactgatggaagctggagtaaacatgg

SEQ ID NO: 2938 - DNA, 72 bp, Homo sapiens
ggcgtggccaggcttggtgtttcatcacagcagcccgaacggagacaggaaggcaccaagaggcattgctca

SEQ ID NO: 2939 - DNA, 72 bp, Homo sapiens
aaatcaggaacctttactcagccaaaaatacccagcgtgaagagcatgaaggcttcattttctacaaagcaa

SEQ ID NO: 2940 - DNA, 72 bp, Homo sapiens
tttattgagtgtttacagtgcaccagacaccatgccgtcactttcttatttgtgccaattctatttaatgtc

SEQ ID NO: 2941 - DNA, 72 bp, Homo sapiens
gagggcgaggaatttgatgactgggaggacgactacgactatcccgaagaggagcagctcagtggtgccggc

SEQ ID NO: 2942 - DNA, 72 bp, Homo sapiens
cgctcgcttggagaggactgacagctctatggcgccgagtcatggtccctggaaacaagagaggtcttttca

SEQ ID NO: 2943 - DNA, 72 bp, Homo sapiens
gcacctctgaccacgtcacgctccgagaacatggacgctgcacctctgaccacttcctgctccgagaacgtg

SEQ ID NO: 2944 - DNA, 72 bp, Homo sapiens
ggtgggctgtgagggaacagaggaggcttgtgttccgggctgggctctcagggcaggaaatcacccggagga

SEQ ID NO: 2945 - DNA, 72 bp, Homo sapiens
ataggacagtcctccgggaaacagaacagcttgtccgtgtactcaggaagctcatgtgggatacacggtggc

SEQ ID NO: 2946 - DNA, 72 bp, Homo sapiens
aaccctactatgacatcattttctagtcacagggacggagcaataaggtgtgatgcgggtgctccaccgagg

SEQ ID NO: 2947 - DNA, 72 bp, Homo sapiens
tagagggtaaggaggaaagcaaggaggagacggtccgtgcccagggtaggcaccacccacagcactgtcagc

SEQ ID NO: 2948 - DNA, 72 bp, Homo sapiens
tcgttatactctggccttttcccgtttttgtcattcgaactcatatacatattgaaatcgaagcacacacaa

SEQ ID NO: 2949 - DNA, 72 bp, Homo sapiens
gacatggtggtaagtgcccgtaggcttgtagtccccgctacttggaaggctgaggcaggaggattgcctgag

SEQ ID NO: 2950 - DNA, 72 bp, Homo sapiens
cctcgaggccgttatttgtctctggtgaagtcctgcgtatgggctcaggggcaggagggtggactgaaaggc

SEQ ID NO: 2951 - DNA, 72 bp, Homo sapiens
cgctgcctgctggggctggtgagtacggatccctccgcagctgcctgcccatttcctctcatccagccgagt

SEQ ID NO: 2952 - DNA, 72 bp, Homo sapiens
caagccagccttcctcctgctgcttccagactagtcgggagtgttgagttaggaaccagggttggttctcca

SEQ ID NO: 2953 - DNA, 72 bp, Homo sapiens
gtaggtcccctccatcccggccgactggcctcctgcggtgcaaacgcaagatcttgactttcaagaggcttt

SEQ ID NO: 2954 - DNA, 72 bp, Homo sapiens
acccactcagtgacagacgaacacagctaaggcctcgctgccagccttctgacggcgggcgagcacacggtc

SEQ ID NO: 2955 - DNA, 72 bp, Homo sapiens
aaaaaaaaaaaaaaaattaagtaacaggagattttcgcaacagttcagctcaatcatagaagaaaaaccaca

SEQ ID NO: 2956 - DNA, 72 bp, Homo sapiens
tgggctgcccacatgagtcagacctgcaggtgacacgaagaagggcctaaaaccccacaggcccctgctgtg

SEQ ID NO: 2957 - DNA, 72 bp, Homo sapiens
taacgatcaaccagtggtgatcaactaatgttcttcgggtgttgtttttgtggggcgcattcttatgcaaaa

SEQ ID NO: 2958 - DNA, 72 bp, Homo sapiens
gcgtgatgtggccccgtctggctaagagcaccagacggcggtggctggagcaccccgtgccactgcaaacgt

SEQ ID NO: 2959 - DNA, 72 bp, Homo sapiens
gaggctgggcaggcctgcaagttttggggcgtcaccgatctcccctaaactcagtagcgctaggcggcttag

SEQ ID NO: 2960 - DNA, 72 bp, Homo sapiens
caatcccctacaccttctggggcctcccagattgacgttttcatttcccgggctccacgacacgcagggact

SEQ ID NO: 2961 - DNA, 72 bp, Homo sapiens
tgtactcccagcaggtgcagcacttcccactcctacgtgactgagccgtgagtagcagaagagtcaggcgct

SEQ ID NO: 2962 - DNA, 72 bp, Homo sapiens
ctagaaatggcactgcaacgatcctggaataaaaacgaggggccacagtcagaaatgacaaacgcctccacc

SEQ ID NO: 2963 - DNA, 72 bp, Homo sapiens
ctgaaggacaggccccagggcttgcgttgttttttcgtcattgccaggcacctttgctgagtcatttggggt

SEQ ID NO: 2964 - DNA, 72 bp, Homo sapiens
gctcttcagggtcactctgggtaagtgttatgttacggtggatatgagcaaaacagagaggtaaggagcaga

SEQ ID NO: 2965 - DNA, 72 bp, Homo sapiens
cgaagaacccaggctggagggagccggagggtaatcgtgctgctccgctatggacggtggtggcccaggaga

SEQ ID NO: 2966 - DNA, 72 bp, Homo sapiens
gtgaaacgggaacggatgtggcttcttaaccattacgctgtgtccgtcacagtcattctcacttctcgagta

SEQ ID NO: 2967 - DNA, 72 bp, Homo sapiens
tgcagactgtgccaataagcagtcgaggcttgttgcgatctgcagaaatctacagaattctctgtttccgag

SEQ ID NO: 2968 - DNA, 72 bp, Homo sapiens
gggagactccaggagacccaagggcaggctgcatgcggaagtctgggccacacctggtatggctcacctcag

SEQ ID NO: 2969 - DNA, 72 bp, Homo sapiens
gaaggtacagccgcagtcagggcagatggggcccccggacgtctgcctaggaatcagtcggggtttgctggg

SEQ ID NO: 2970 - DNA, 72 bp, Homo sapiens
tgcgcccggtgcatcgctggtgcagaatcaaatggcgcagccgctgtggaaaccagtgtggtgggaggctcc

SEQ ID NO: 2971 - DNA, 72 bp, Homo sapiens
aattcatatcccctgttcgtctcatgcgcgtcctccgtccccaatctaaaaagcaattgaaaaggtctatgc

SEQ ID NO: 2972 - DNA, 72 bp, Homo sapiens
catgcacgggacagcctccaccacaaagggtgacccggccccaaatgctggtcatgctgaggtcaagaatcc

SEQ ID NO: 2973 - DNA, 72 bp, Homo sapiens
agtgccttcatgctcagatgctatcttgcagatgccgctgtcatgcccacttttctgaccgggacgcaaacc

SEQ ID NO: 2974 - DNA, 72 bp, Homo sapiens
tcccgggatagggctaaagcgatgggatttccagacgagtctttcccaggccaacttttaaaggtcggagga

SEQ ID NO: 2975 - DNA, 72 bp, Homo sapiens
gagacagctatgtcgcccaggctgcagtgcagtggcgccctcttggctcactgcagcctccgcctcccgggt

SEQ ID NO: 2976 - DNA, 72 bp, Homo sapiens
acatgaaaatcactaaaaggaaaggaagcaatcagcgcccagcctcagccactttttgcatttggaggcatg

SEQ ID NO: 2977 - DNA, 72 bp, Homo sapiens
tccttcctcccgggagcggtcgtttgggagtgctccgtgggttaagcaaacgcaagctgtaagtgatgactg

SEQ ID NO: 2978 - DNA, 72 bp, Homo sapiens
cacagtctgttgattctcctcggtccctaagacaacgccttgcaagcatcacgcccctcgatgttgcttacg

SEQ ID NO: 2979 - DNA, 72 bp, Homo sapiens
acaagctgaagccttgcctggtgcaacgtctgtgtcgaggcacctcagggtggactggtgctggggatggca

SEQ ID NO: 2980 - DNA, 72 bp, Homo sapiens
tggggaaatctgcgccaacagctgagttgcccaaccgagggatttcaagctttccaagaactgacgtggttt

SEQ ID NO: 2981 - DNA, 72 bp, Homo sapiens
tggccagctgtgtgaccctggacaggcctccaccccgcttgcaagccagtgggaaactgagatcatggaggg

SEQ ID NO: 2982 - DNA, 72 bp, Homo sapiens
gccgggagagctcactgaaggagcagagaggcctgcgcggctggagcagacctgtctggggagagttcagag

SEQ ID NO: 2983 - DNA, 72 bp, Homo sapiens
tgagccagaagggatttgagagatgatgaaagctacgtatgttacccataacctaaggacttctggcaaggt

SEQ ID NO: 2984 - DNA, 72 bp, Homo sapiens
gagagagtgggtgcggtgtagaggatgctcttggccggctggagcaagacctggctcccaccagagggacgt

SEQ ID NO: 2985 - DNA, 72 bp, Homo sapiens
cctacccccgcccctcctccttcctccccggcatgcgccatatggtcttcccggtccagccaagagcctgga

SEQ ID NO: 2986 - DNA, 72 bp, Homo sapiens
gacagctacaaggcaccacaatgacctagaggcttcggaaagttgcacaacaggatatgaggccattcctgg

SEQ ID NO: 2987 - DNA, 72 bp, Homo sapiens
gactgagaacaggctggtcccttcctagcggtcaccgtgtgacttgggggccagcctgagcagtgtacatga

SEQ ID NO: 2988 - DNA, 72 bp, Homo sapiens
gctccaagaacctgatcctttggctggggcagggccgtagaggtgggcgcagagcttcggggagctggctgt

SEQ ID NO: 2989 - DNA, 72 bp, Homo sapiens
tccaactgctctcacagaaagctagaggaacatttcggtattcagagccttcagacacatgggctggggttg

SEQ ID NO: 2990 - DNA, 72 bp, Homo sapiens
tgtgtgcaacttctcacgatacctttaactactcccgacactgagttcaaacagtgtttgaactgtaagtaa

SEQ ID NO: 2991 - DNA, 72 bp, Homo sapiens
ggcctttgcttggcccagttttaaagtacttctcccgtttctcaggattctttaaacataccagaaatgaaa

SEQ ID NO: 2992 - DNA, 72 bp, Homo sapiens
gcggcggatggggacatcgctggcacacacatacacgtagacctggttgtcacaggcaatgccccagcagca

SEQ ID NO: 2993 - DNA, 72 bp, Homo sapiens
tgtgcctctagctaatttgcaggcagatgacacagcgtgagaagcctctgatttagtagaataagaactatt

SEQ ID NO: 2994 - DNA, 72 bp, Homo sapiens
cccaccttcagtgactgtcatctccatagcaaagccgtttgtcattaggaactgaggtatgtttagaaaagg

SEQ ID NO: 2995 - DNA, 72 bp, Homo sapiens
ctccagcagtgccctccctggccctggaggcccggcgtggctggtgtcatctgtgaggggaactaggcccag

SEQ ID NO: 2996 - DNA, 72 bp, Homo sapiens
tttcctctcgcctcccacgtcctcactaagttactcggggaccccaaggaaccaagaacgaaaagtaggaag

SEQ ID NO: 2997 - DNA, 72 bp, Homo sapiens
tccagactgtccgcccgcagccgctcccgctcggccgcccctgccagcccccggagctgctccagctgccgc

SEQ ID NO: 2998 - DNA, 72 bp, Homo sapiens
tctgggaaatgcagaggctgcctgccgctttctttcgcagttttgcggcccaaggcttgggcgaatcagttc

SEQ ID NO: 2999 - DNA, 72 bp, Homo sapiens
attcggccggatggccacgcggcgcccgtccttgccggtgtactcgaaggggtgctccaccagcacgtacac

SEQ ID NO: 3000 - DNA, 72 bp, Homo sapiens
aattccacccaggctctaaagcatagctcaagtcgcggcttgtcagggtccctgcagccaaggccactgcct

SEQ ID NO: 3001 - DNA, 72 bp, Homo sapiens
aaaatgacagcagacaggtacggcttgcaggcacccgtgggtgcccgtgattaacccagaccagggtagcca

SEQ ID NO: 3002 - DNA, 72 bp, Homo sapiens
agcagagggaggtagggtgtggtgggggagggagccggggtcatcacagtggatgccaaggccagagttccc

SEQ ID NO: 3003 - DNA, 72 bp, Homo sapiens
ggatctggagtcgaactcatgtcacttattaacctcgtgtgcctgaataagttacttaacttccttctgcct

SEQ ID NO: 3004 - DNA, 72 bp, Homo sapiens
gggcctcaaacgtggggttcaatggggagcacgaccgcttgttggtgctgatctaagatttcacaacagcag

SEQ ID NO: 3005 - DNA, 72 bp, Homo sapiens
ggatcagtcgagccccgctggtgggatgagtctgccgggacaaggggtgctagctgtggtcctcgtctgcct

SEQ ID NO: 3006 - DNA, 72 bp, Homo sapiens
gataatttcagactcaaaccttttctagtcctctgcgattcttctcagccatcaggcactgcctacaatacg

SEQ ID NO: 3007 - DNA, 72 bp, Homo sapiens
tctctgaaagatagcgatcttaggttggtcctctgcgaaagggccctgggaacagcgcctccctagtcaaac

SEQ ID NO: 3008 - DNA, 72 bp, Homo sapiens
agaagcccaaacctcagcattatgcaatatatccacgtaatgaacctgtacatgtacaccatcccccaccat

SEQ ID NO: 3009 - DNA, 72 bp, Homo sapiens
ttttctttcacatatgtgttgcccatttggcctgccgaaatgcagcctgggaacaagttcagtggttagtgg

SEQ ID NO: 3010 - DNA, 72 bp, Homo sapiens
gggctgaatggatttctgttggatgaatgaagggacggcagttaaagagccaggttgccagctgacattgcc

SEQ ID NO: 3011 - DNA, 72 bp, Homo sapiens
gacaaaatgtacctgtcagagagagcgcggagagccgttctctgagctgcctgctggaagaaagaaagggca

SEQ ID NO: 3012 - DNA, 72 bp, Homo sapiens
gttaatgaggcctcaacctaagcctgttgctgttgcgtgatcagcatggttttccctgaaatttgccttttc

SEQ ID NO: 3013 - DNA, 72 bp, Homo sapiens
catagtaaagttggaaaacagacccatgacctccccgcgcggccggtgcctcctgccctctctctaggaggg

SEQ ID NO: 3014 - DNA, 72 bp, Homo sapiens
gtaagtgttcagtttatgagtttctctgtaactggcggctgatgaaaagaagcatttcctgttggtcttcga

SEQ ID NO: 3015 - DNA, 72 bp, Homo sapiens
agtggaagccagaagaggaggaaaatgttttgccacgtggatgtgaagatttcctctaaaaggtacacatgg

SEQ ID NO: 3016 - DNA, 72 bp, Homo sapiens
tcagttttcattcaagcagacacagcatccgacaccgcctatggaccagagtttgattacataatactcgca

SEQ ID NO: 3017 - DNA, 72 bp, Homo sapiens
gggcaagtcacattccctcagctactgcggcagttcgggccactcgttttgtgtatggttttttttcccctc

SEQ ID NO: 3018 - DNA, 72 bp, Homo sapiens
catccctctggcttggaggggcttctagttgttgccgcagctgctccttctgcttctgataggcatcccgga

SEQ ID NO: 3019 - DNA, 72 bp, Homo sapiens
ggcaggccaatcactgcaatggacagcaaagagaacggaatcagtgttgctgccagccctgcagttctcctc

SEQ ID NO: 3020 - DNA, 72 bp, Homo sapiens
actggttaccacccgcagcggtcctggaggcaccacgcatctctagacaaaaggggaaacaggtttgggggt

SEQ ID NO: 3021 - DNA, 72 bp, Homo sapiens
aagcaatgctgtgtcattctgacagccctgcatcacgcagccacccagcagggcctggagccttcccaggcc

SEQ ID NO: 3022 - DNA, 72 bp, Homo sapiens
ggatgcccactgtgaagtccttcccagtgtgaaaccgcaatccttcctgcttggggttcccctaagggaacg

SEQ ID NO: 3023 - DNA, 72 bp, Homo sapiens
gcagtgcaggggacagccagagggatctaggcttccggtctccctcctccctgtctccaaagcggcaccgcc

SEQ ID NO: 3024 - DNA, 72 bp, Homo sapiens
aggtaccttcagggttgtcctttcatctgaaaatgcgttgtggtctcccgctgagggctcagtcagctcaaa

SEQ ID NO: 3025 - DNA, 72 bp, Homo sapiens
tttctcctgtgaatcagggagcgtagctctgcctgcgggacccagggttgacacgtcctgcccgttaagtga

SEQ ID NO: 3026 - DNA, 72 bp, Homo sapiens
ttactcaatgcagtttctttctcaaaagttcagctcgttcaaccaactgatacttagttccctgaaatattt

SEQ ID NO: 3027 - DNA, 72 bp, Homo sapiens
gctcccgattcctcacttccaagtcgcttagaccccggccaatgaaaacaataggaggaaaaccagagggct

SEQ ID NO: 3028 - DNA, 72 bp, Homo sapiens
ggaaacccaagaacggtgcctagctcggctctgtccggcctcgagtcccctcatcccagactgaactgctgg

SEQ ID NO: 3029 - DNA, 72 bp, Homo sapiens
gcccactaacagtcattctctatttcgtttgcatgcggctatccagttgtcctagcaccatttgttgaacta

SEQ ID NO: 3030 - DNA, 72 bp, Homo sapiens
ctgttacttccactatgatattggagggtgatggtcgtcttatgctcttatgcaattatgtaaatcattaga

SEQ ID NO: 3031 - DNA, 72 bp, Homo sapiens
agcttagagtcagaaagccaaacctcagagattcacgtcagtcccaaagcctccagagaaagaaaataagcc

SEQ ID NO: 3032 - DNA, 72 bp, Homo sapiens
gaacagcttgtctagggaactgttggccctgggaccgtgaacagctttcacaccccggaaacctgtcacaag

SEQ ID NO: 3033 - DNA, 72 bp, Homo sapiens
ccaccttctacccgcccaccctggtccactctcctcgcacctcggctagacactgtggctcctcagcctggc

SEQ ID NO: 3034 - DNA, 72 bp, Homo sapiens
tggcccctgctgctggctgctatggtggctggagccgggtgggctggataattatgccttacataagtggga

SEQ ID NO: 3035 - DNA, 72 bp, Homo sapiens
gtggagagccgggtgggaactgtgccaggggatgccgccccaactctgcacagcaggtctcctctcgccccc

SEQ ID NO: 3036 - DNA, 72 bp, Homo sapiens
tgtgttagggaccaggaggcacacggctgagagcacgctcaggagaaaaataaaaacaagaggtctgggctt

SEQ ID NO: 3037 - DNA, 72 bp, Homo sapiens
gcacacccatgtgtgggctctgccctggccttaaccgagagagggaaatgttgacggggaagaaagccctgc

SEQ ID NO: 3038 - DNA, 72 bp, Homo sapiens
ggtggcggttgacttggaagcagcgtccgggatagcgcgtgctccaggaatactctgaaagctgatgccgtt

SEQ ID NO: 3039 - DNA, 72 bp, Homo sapiens
accactgcacttcaacctgggtgacagagtgagaccgtctcttaaagaaagaaaaaaaaggaaaagaactgg

SEQ ID NO: 3040 - DNA, 72 bp, Homo sapiens
tattaatgtgtgacttagttctcccttttttgtcacgatgtttaaaattttttttgttgttctccaaaagct

SEQ ID NO: 3041 - DNA, 72 bp, Homo sapiens
tgacggccagcagccccagctggttggacatgttgcgcaggttcctggccaggggctcctcgctgccgtaca

SEQ ID NO: 3042 - DNA, 72 bp, Homo sapiens
gtcacccgcatttcctagagtgccccagctctaatcggaaggtacggcccacttctgggccgtggagaacga

SEQ ID NO: 3043 - DNA, 72 bp, Homo sapiens
gtccctattaggttttgcctccatgaccatgaggccgttgtttacacatcagcgtctaagaatattcccaca

SEQ ID NO: 3044 - DNA, 72 bp, Homo sapiens
atggatggtggtgcagcagtgggttaaagttaacacgagacagtgatgcaatcacagaatccaaattgagtg

SEQ ID NO: 3045 - DNA, 72 bp, Homo sapiens
gccgagctgtggggatgtggatcccagactgaccccggcatggaaaaccaccagcgtggcccggcgccagac

SEQ ID NO: 3046 - DNA, 72 bp, Homo sapiens
agagacagggccaggaaaagaaggtgagggtgtaacgtcattcagagaccagctgcacccagggctcacctc

SEQ ID NO: 3047 - DNA, 72 bp, Homo sapiens
actgttagcaggaaaagcagctacttcccacccatcgtcttctgttctctgccactggcatgactcacacac

SEQ ID NO: 3048 - DNA, 72 bp, Homo sapiens
tttgtcgaatttttattatttgttttcccgccaagcggaaaaggttttattttgtaattattgtgatttccc

SEQ ID NO: 3049 - DNA, 72 bp, Homo sapiens
ccacgtgtgaaatgcagagttgcgtcaggcggtctcggcatcttccagcaggaagaaccttctggaatcagc

SEQ ID NO: 3050 - DNA, 72 bp, Homo sapiens
tgcaccgccaagcaccctccgggctgctgacgacacggtcagattccccagtgcgtgagcctatactacagc

SEQ ID NO: 3051 - DNA, 72 bp, Homo sapiens
tccggtctccctcctccctgtctccaaagcggcaccgccctcgtgcgggttttctaaccgggcagagtcctg

SEQ ID NO: 3052 - DNA, 72 bp, Homo sapiens
cacaggtggcgcctaggaggatgtctgtgtccaggcggtctcccaccatgacggtgcgctcggggttgatgc

SEQ ID NO: 3053 - DNA, 72 bp, Homo sapiens
ggtaagtaattctgtagaaagtggaactgttgttgcgttgtgtgttttgagtttggataaattttttatcta

SEQ ID NO: 3054 - DNA, 72 bp, Homo sapiens
taattaggaaagcacacccttgcaggcccagcctccggtgatctctttgttcctctgtctcttcctgcccca

SEQ ID NO: 3055 - DNA, 72 bp, Homo sapiens
ctccggcccacgaggcaggactggcggcgttctcacgtcctggaagtcaaggccccaaggggaccgaggcgc

SEQ ID NO: 3056 - DNA, 72 bp, Homo sapiens
agggcgctgggggcctcgagggtctctggtactggcgccggggcacaatccagagccctgcgcgccgcccgg

SEQ ID NO: 3057 - DNA, 72 bp, Homo sapiens
acacgcccctacttagttcctaaaactcaagggcacgcgcacacacctacttatttcctaaaattcaagctc

SEQ ID NO: 3058 - DNA, 72 bp, Homo sapiens
ggcaggtcgcggccctactgcctcaggagacgatgcgcagctcatttgcttaaatttgcagctgacggctgc

SEQ ID NO: 3059 - DNA, 72 bp, Homo sapiens
ggcgatgtagtggtggaaagaagaggcagagaggtcgtcgtcgtcgcccagcagcaagggctgcaaaatagt

SEQ ID NO: 3060 - DNA, 72 bp, Homo sapiens
ggagcgttggtcacgtgtgtcaaggcctggtgacgcgtgtcttatgtgcctccctgggcatcttctcagtac

SEQ ID NO: 3061 - DNA, 72 bp, Homo sapiens
cttccctgatctgatcccactgaccagcaccttatcgacgaggttgcttaaagtaaatcaccatcccgttga

SEQ ID NO: 3062 - DNA, 72 bp, Homo sapiens
caggcatatccacttacgttctggaatctcaagctcggggtggacagacccagggccctgtttggggctggt

SEQ ID NO: 3063 - DNA, 72 bp, Homo sapiens
caaaagccaagagaagttgaaagccaggcctctcacaccagttagccaagttgggaatgcaaaggaaaagtt

SEQ ID NO: 3064 - DNA, 72 bp, Homo sapiens
aatgcactgggatcctactttgtgtttgtgctctgcggggagggaaggtaaggtaaggtgcgggcaggattg

SEQ ID NO: 3065 - DNA, 72 bp, Homo sapiens
actgcagctgcctagttcacattcttcacctggcccgttgttccatccagtcttgacctcgctagcctgcag

SEQ ID NO: 3066 - DNA, 72 bp, Homo sapiens
gactttgcctttttgtctccagtatggagagggtgcggacagagaccggccgcccgaggcctgagagccgga

SEQ ID NO: 3067 - DNA, 72 bp, Homo sapiens
caaagattatcaccaggcaggctaaacttagcaaccggcttttagctagaagggcagggggctggtgtcagg

SEQ ID NO: 3068 - DNA, 72 bp, Homo sapiens
ccacgaggctggttcttgtggtcctgggcaccatccggtcactttaaagtagcaggtgtccccgatggtaca

SEQ ID NO: 3069 - DNA, 72 bp, Homo sapiens
agaacgagttggcatgcaggactaggttgccttgacgactctgagttctgacagggaaatacaatgagtttt

SEQ ID NO: 3070 - DNA, 72 bp, Homo sapiens
tttggcaataaacataaaaagtctagtaacacaggcgtaagcctggaatgttcagtgactggtcactgtcag

SEQ ID NO: 3071 - DNA, 72 bp, Homo sapiens
gccacgcccctgccctagtcccgcctcgcaagcttcgtctctccagtagccccgccccagagccgcttagcc

SEQ ID NO: 3072 - DNA, 72 bp, Homo sapiens
ccccacgaacgccagcaattgcactgatgccttggcgtactcaagttgctccccagcacccagccccggttc

SEQ ID NO: 3073 - DNA, 72 bp, Homo sapiens
tatgcagcccaatcagtccccagggtctcggttcccgttgcgcccttccccatggccactgcgctcattcat

SEQ ID NO: 3074 - DNA, 72 bp, Homo sapiens
agaaacccctacgtgtgggactgagtcagcggtggcgaggagaggcgggcggatttggggagggccctgagg

SEQ ID NO: 3075 - DNA, 72 bp, Homo sapiens
actcaacatgaggtcccgtgggggctgcctgagggcgtagcttccagaattcagcccctggccctcagaagg

SEQ ID NO: 3076 - DNA, 72 bp, Homo sapiens
gaagaatcacagaccatgtgcagttctgagaaccccggtcaggtcagctgggaaatgtggtgcaaagatcac

SEQ ID NO: 3077 - DNA, 72 bp, Homo sapiens
atgaaagggaaggggacgaaggaagaaaaacactccggtccaaaagtaccctcaagcccttaccccacagcg

SEQ ID NO: 3078 - DNA, 72 bp, Homo sapiens
agggttatgaaaaacttactggggacaggagacaccggattccatcaagaggccccatatatgtggaagttg

SEQ ID NO: 3079 - DNA, 72 bp, Homo sapiens
gcagggaacactctctctgtcacccagggagagcccgagtggccagaatccgaagtcaccattagacactct

SEQ ID NO: 3080 - DNA, 72 bp, Homo sapiens
cagggcaaaggttctggcccattggcatgtgaacgcgaatggggaggaagagggggagaaagggcgtggctt

SEQ ID NO: 3081 - DNA, 72 bp, Homo sapiens
aatcacacaccgggccccagcactgcccgagccggcgagggcctctgtgcaccagctccattgccaggcagg

SEQ ID NO: 3082 - DNA, 72 bp, Homo sapiens
agaggccaggaagcctggcttctggccgccctgcccgctcctcacgtgtgaggggaactggggaagtcgagt

SEQ ID NO: 3083 - DNA, 72 bp, Homo sapiens
ggagcttgcatgaatgacgatttccaaacttctctcgtgtgctggtagttacaccaaatagcactttcttca

SEQ ID NO: 3084 - DNA, 72 bp, Homo sapiens
aagattcccctttatgaagagtcatttgggactcccgggcgcttccatgaacatgtatgtgctcatgtttga

SEQ ID NO: 3085 - DNA, 72 bp, Homo sapiens
tgcatgtttattttggccaacaggctaaagaaccacggagaaagcaaaagggccgctggaaataacactgat

SEQ ID NO: 3086 - DNA, 72 bp, Homo sapiens
gggacatttctgagccatgagcacaaggctgctggcgtccaactgctctgtctgccccagctcaggccaggg

SEQ ID NO: 3087 - DNA, 72 bp, Homo sapiens
taatattgcataactacattgcaagctttttagtgcgtttacaaatttctttgaatagaagtgtaagtgagc

SEQ ID NO: 3088 - DNA, 72 bp, Homo sapiens
gaatggggctgaggaggggcttgggctctgcccaccgcccaggcctcctattgtggagaggacagctgcaaa

SEQ ID NO: 3089 - DNA, 72 bp, Homo sapiens
tcttttatgtctgtggcgttgggacaagcggagcgcggctgtggatcaccagaataaacaacgtgggccgat

SEQ ID NO: 3090 - DNA, 72 bp, Homo sapiens
gctgctggccttgctgctgagcggtgagtgagccacgtgcccatccatccagcctccaggccccggtggatt

SEQ ID NO: 3091 - DNA, 72 bp, Homo sapiens
gcttccccttcaggtcttggtttgttctgaagggacgttttatagtcactatccacatgccagtgtgaaatg

SEQ ID NO: 3092 - DNA, 72 bp, Homo sapiens
aattgtcatttggcaactcaaggtcactcaaattacggcctgttgctttccctgcctggagcaccagagcag

SEQ ID NO: 3093 - DNA, 72 bp, Homo sapiens
gggtacttggatatttggtggcaatcagttcttttcgtaggggcggtgacagcttcagaatttggtaatgtc

SEQ ID NO: 3094 - DNA, 72 bp, Homo sapiens
tgctgcctgtctgtgagcttcagtgcccaatgagacgcagcaagctttcgcctcttctttctacactcctgc

SEQ ID NO: 3095 - DNA, 72 bp, Homo sapiens
caagggcctcggcagcttcctcagtggggcagggccggcgatgccagccagggacgccggagaggctggggg

SEQ ID NO: 3096 - DNA, 72 bp, Homo sapiens
cttgccttagagtcttgaaccagtcttggatttcccgccatctgggttctggctggcttgcaatttctcctt

SEQ ID NO: 3097 - DNA, 72 bp, Homo sapiens
aggcaagttacttattcttaggccttgcatttgcccgattccatcagacaggcctgagcacatgaaacacca

SEQ ID NO: 3098 - DNA, 72 bp, Homo sapiens
ttactcacgcctttctacacagtcatgatttatgacgtcagagatgaactggaatataggctcctaggaaat

SEQ ID NO: 3099 - DNA, 72 bp, Homo sapiens
gtgaccttggccaaattattcaaatgttctggcttcagttcctgtatcaaaaaagtggaatctttcaaatgt

SEQ ID NO: 3100 - DNA, 72 bp, Homo sapiens
agctaggagtctcttgcatgtcccaagtcagaaggcggaggtgcctaaatgctggattccagctggcacata

SEQ ID NO: 3101 - DNA, 72 bp, Homo sapiens
ctctggcgggcctccctgaatgtggcctggactcgcgcacaggccctgtctcgcaggtttgcaggtgcgctt

SEQ ID NO: 3102 - DNA, 72 bp, Homo sapiens
cagtggaaattagctgtgattttccctgctctgtgcgaagagctggcatttcctcatttatccattcatcca

SEQ ID NO: 3103 - DNA, 72 bp, Homo sapiens
ctggagcccggcatctggaaaggatcagctgccaccgctaaactcacccctccacccacagctcattcccgg

SEQ ID NO: 3104 - DNA, 72 bp, Homo sapiens
cccctcacgctgcctctcatggtgtgggaacccctcggcgagctggaggacatcctgtcctgccctgacccc

SEQ ID NO: 3105 - DNA, 72 bp, Homo sapiens
agctggctctggggttctcaagatttattcaggatcgtgttaacggaggcggtgggaggatagggtccctga

SEQ ID NO: 3106 - DNA, 72 bp, Homo sapiens
tgagcagcgtccactcagagcaagtgtttgcactgcgtctgcaggacaaaaagctcccaccgctgctctctg

SEQ ID NO: 3107 - DNA, 72 bp, Homo sapiens
ccctgcttttgtggaggcctttagcaaagattccacgttcatgctgagaggaacactgtgggagttgggtgg

SEQ ID NO: 3108 - DNA, 72 bp, Homo sapiens
actttgaatcccagaggttaacacttcctcctctccgtctggcaaaacgctgcagtgctgacttcagaacag

SEQ ID NO: 3109 - DNA, 72 bp, Homo sapiens
acatgtgtatattaataaaatgagaacatagcactcgattgaaccaagagtttattcacacaccatgcatca

SEQ ID NO: 3110 - DNA, 72 bp, Homo sapiens
acctagctttctcttctccaagcagtagagctgcccggaaaaagccaggcagaagtgctatggggcaggctc

SEQ ID NO: 3111 - DNA, 72 bp, Homo sapiens
cctgaccagtgtagtagggaactgggtcccacttccgcagcccccagccctgtcttctagagttagactgta

SEQ ID NO: 3112 - DNA, 72 bp, Homo sapiens
gggcctgtgttaatcagaggttggtgtcatggccacggataacttctccattactccatagacaaaatgtaa

SEQ ID NO: 3113 - DNA, 72 bp, Homo sapiens
acaactctttctaaggctgacaagtagacaaaaaacgtaaagatgcagaaccctcggctgccacacatgctg

SEQ ID NO: 3114 - DNA, 72 bp, Homo sapiens
caccattcttctccgtcccccctcccccaagctggcgcctactatccagcccaaggggtgcagcagtttccc

SEQ ID NO: 3115 - DNA, 72 bp, Homo sapiens
tggaggggccaggcacccactggagccacccagcccggcttccagccccgcctccagctcaccagcagctga

SEQ ID NO: 3116 - DNA, 72 bp, Homo sapiens
cggggcctgactgagagcggggcgggatctccttccgggctggggaacagatgccctggcgtccttggcact

SEQ ID NO: 3117 - DNA, 72 bp, Homo sapiens
agccattctgacactgttccttatctaggatctctcgctttctccccaaagctgcttattagggaagttttt

SEQ ID NO: 3118 - DNA, 72 bp, Homo sapiens
agggtattgcatttttcctttgtggtggattggtccgtgcacttgaaaatacattcacagtgggaaggcacc

SEQ ID NO: 3119 - DNA, 72 bp, Homo sapiens
gaacaagtcttacttctagaacccccagggcccagcggagtgtctgacacatgatagtcgatgttgattaaa

SEQ ID NO: 3120 - DNA, 72 bp, Homo sapiens
gtcagtgcagagaagtggccttgagtaagaagagccgggctaagggagcttgggcaagtgctcagccaatgg

SEQ ID NO: 3121 - DNA, 72 bp, Homo sapiens
ggtggaaatttcataacttctggaggctgagcacacgccaccacatttggctaaatgtacttttctggagag

SEQ ID NO: 3122 - DNA, 72 bp, Homo sapiens
acatgaccaccctcacaatactcctgcagagcgcacgcgtttatttccccacgccaaaggtgaggcctcaga

SEQ ID NO: 3123 - DNA, 72 bp, Homo sapiens
ccgttctgtagctgtgttgtccattgacaggtggtcggattgtggccattgagtaactgaaatgtgaccagc

SEQ ID NO: 3124 - DNA, 72 bp, Homo sapiens
ggctttctgctgcctcttgagtaactgttctctggcgggcaaggtggggctggggggtctgagaccctcctg

SEQ ID NO: 3125 - DNA, 72 bp, Homo sapiens
gaggtgagagcgcctgtggggcgggggcatatccccgaggggctggggctgggtggaagctcgggcctcccc

SEQ ID NO: 3126 - DNA, 72 bp, Homo sapiens
gatgcattttcttcagaatattgtctcccatcccacgtcctgacttcccaacaccaagaacaacaacaaaaa

SEQ ID NO: 3127 - DNA, 72 bp, Homo sapiens
gataaaccctgggtgatgtgtcattttcccctttccgttccttcccacgcccttccccccacctccccgcgt

SEQ ID NO: 3128 - DNA, 72 bp, Homo sapiens
cctccccactccccttctcccatctcagtaaaatacgtttcctaggctctttattatgtggcggatgatttt

SEQ ID NO: 3129 - DNA, 72 bp, Homo sapiens
gttgagataaacatcccagagggttttccacattacgtaaattttcaagtgtgatgtgaagggacccgtgag

SEQ ID NO: 3130 - DNA, 72 bp, Homo sapiens
catggcccccaaaaacgtttgggaggaaccagggacgggctgagcaggcaactggaaggcgacggaccatgg

SEQ ID NO: 3131 - DNA, 72 bp, Homo sapiens
caaacatatgatcagcacatggaaatgtggtaattcggatgcattcgtgattgcaacagattgaagaaatta

SEQ ID NO: 3132 - DNA, 72 bp, Homo sapiens
tctcagacagctaatgacaggttccttctccctggcgcggccacctcccctctccagcgggtggagatggag

SEQ ID NO: 3133 - DNA, 72 bp, Homo sapiens
gattggcaaatgcctttgtgacacatcacagagcacggtggccatggtgaaaatttggcagctgtgactcct

SEQ ID NO: 3134 - DNA, 72 bp, Homo sapiens
aagccttttaggcattacgatgatttgaggggctccggaaagcatttctcaaaagtactttgtccatagacc

SEQ ID NO: 3135 - DNA, 72 bp, Homo sapiens
ttcctgatgatacatctcagtgggcctaaaggaaacgaaacacctacaccattgctcaatgctggaaaattc

SEQ ID NO: 3136 - DNA, 72 bp, Homo sapiens
acagggactttgggtggcttcaggcacccacctctcgactctgaggaggcctcaggaaacccttaatgagtc

SEQ ID NO: 3137 - DNA, 72 bp, Homo sapiens
attaatatccccacttaaaaatgaggaaatggaagcgaggtcacttttgtacagttatttaacaagtaagtt

SEQ ID NO: 3138 - DNA, 72 bp, Homo sapiens
ttatttcctgtgttctgttttttaaaatctttttacgggttagacgagggaacttgaaacaaacaaatctta

SEQ ID NO: 3139 - DNA, 72 bp, Homo sapiens
tccctgcacccccttaaccacatgccacatcatcccgactgagggataagtctcttggctccacatcagctg

SEQ ID NO: 3140 - DNA, 72 bp, Homo sapiens
tggaggcaagtaggaacttttcaggaattctgacacgttaacatcctgtgagatgcctgcagatggcctgaa

SEQ ID NO: 3141 - DNA, 72 bp, Homo sapiens
cagcccatgagatgtaccccacacttcctctgccccgccccccaagcaggactgtgtctgtgtttttcaggg

SEQ ID NO: 3142 - DNA, 72 bp, Homo sapiens
aaatgagggagaaaccagaaaccgtcctggtaacacgggaggtaattacgtcagaaaccagggacgagactg

SEQ ID NO: 3143 - DNA, 72 bp, Homo sapiens
tcagcccagaaactgctgagcttactggaaaaggacgagttcaagtctggagcccacgtggacttctatgac

SEQ ID NO: 3144 - DNA, 72 bp, Homo sapiens
taatttagcaattactcaatctcacatgtctgcggcgtgacccctcctgcttctttaaatatcagctgggga

SEQ ID NO: 3145 - DNA, 72 bp, Homo sapiens
ggatggttaccagtggttactggtgcctcctgctgcgaccggcctgttcacttgggcatgtccaatcttgcg

SEQ ID NO: 3146 - DNA, 72 bp, Homo sapiens
tagttttctttccttttgcatcataatctcttccccggtctatttatttctcgtggttttgtcagtccatta

SEQ ID NO: 3147 - DNA, 72 bp, Homo sapiens
cttacatagcggaatgaggatggcagttacagcatcgcagtcctgttatttcctggcgcttggaggattgtg

SEQ ID NO: 3148 - DNA, 72 bp, Homo sapiens
tatcactgagacagcctaggaaagcatgccagttccgcttttaacactaatttttgcctattaaaaaattat

SEQ ID NO: 3149 - DNA, 72 bp, Homo sapiens
tccacgaccggtgaccatgtctcaggcccgggagccgacccccggcctcagcaggaagtcagcgggaagcta

SEQ ID NO: 3150 - DNA, 72 bp, Homo sapiens
ttccagtgagtcagctgattctgcagagggaaacgcggttccaaccccacgtcatacataacttttgagttg

SEQ ID NO: 3151 - DNA, 72 bp, Homo sapiens
tttctgcttcttggtagaagctctcctcaaaactacgcattgagtgcctactatgtgcctaacactgacgga

SEQ ID NO: 3152 - DNA, 72 bp, Homo sapiens
aggagtattggatgcctgacggtgtttacaccccacgtcctgctccaaccagcagtttggggagaggttgtt

SEQ ID NO: 3153 - DNA, 72 bp, Homo sapiens
tgtgtagcacttgcatgtacagtgtcccttttcatcgtcacagccctgagaggtaaatggtgtgactcttcc

SEQ ID NO: 3154 - DNA, 72 bp, Homo sapiens
ggatggaggggctccttctgcagggtgaggacgtgcgtggggaggcaggggcagggaggagctggctgagtt

SEQ ID NO: 3155 - DNA, 72 bp, Homo sapiens
ctgctgccctcagttcctgctgaccaaagtcctgccggatctggcgcctacgaggacgtggcgggtggagct

SEQ ID NO: 3156 - DNA, 72 bp, Homo sapiens
ccttcagtagcatcggaggaaaagaacgatacattcgccccagtgtgtcccctgggggacctctggctaatt

SEQ ID NO: 3157 - DNA, 72 bp, Homo sapiens
cctggccgaggccctcaacacacacctgcggcacccggccatcaggtgagcccgcgacctaagcagccctgg

SEQ ID NO: 3158 - DNA, 72 bp, Homo sapiens
tttaagagtaaagtcagggtggtttgggtgtggaccgcttgcaggcggcaccctgagctcaggattgcataa

SEQ ID NO: 3159 - DNA, 72 bp, Homo sapiens
tactaggtttatctctgtgaaaagatcacttttcccggagtgatcttgtggactgaggattaagtgggtaag

SEQ ID NO: 3160 - DNA, 72 bp, Homo sapiens
ggagttccagaccagcctgggcaagactgcccccacgcccacacacaaaaatgaaaaaattagccaggtgtg

SEQ ID NO: 3161 - DNA, 72 bp, Homo sapiens
tttttatttgtgcttcctgctcatgagattgctagcggttactgccctcccacttccaaactaagagatagg

SEQ ID NO: 3162 - DNA, 72 bp, Homo sapiens
tacaatttaacagtgtgacaggaagggatgagatgcgaagaacagtcatggtggaggaagtgaaatgtagac

SEQ ID NO: 3163 - DNA, 72 bp, Homo sapiens
tgtcaaagcctgggcatggccagtgctgagaccctcgctgtcccaccagcgaatccctcgagttctgccccc

SEQ ID NO: 3164 - DNA, 72 bp, Homo sapiens
gtgccctttggataccggggcctggacattttaggcgctcagtaaacagctaagtaaatcatgactgcttta

SEQ ID NO: 3165 - DNA, 72 bp, Homo sapiens
caagtgacgcaaccaagtgtctggattcagagaatcgcaaaatgtttatctggaatcacaaccaccaccatg

SEQ ID NO: 3166 - DNA, 72 bp, Homo sapiens
tctcattttctcacctccagctaggaattaataagcgtgttgctgttgttgttgtcattaacagggaagttg

SEQ ID NO: 3167 - DNA, 72 bp, Homo sapiens
ctcggtcctccctgtggtgatcccttcaacgagtacgcactgagcccgtgatgggccaggtacaatgcacag

SEQ ID NO: 3168 - DNA, 72 bp, Homo sapiens
tcatggcctcgccaaacattatgcaaataatttcacgttcccaggtagctcagccctcccacaaaagatttg

SEQ ID NO: 3169 - DNA, 72 bp, Homo sapiens
aactgcttttcaatgccagctgtgtccaaatcactcgaagtgtgagttagaaacccagggacccctctggaa

SEQ ID NO: 3170 - DNA, 72 bp, Homo sapiens
aattctttggcaaaaacaccttagtattctcaatacggtaactgacttttttttttttgcgttatgaaataa

SEQ ID NO: 3171 - DNA, 72 bp, Homo sapiens
tcatctctaaagcctagtacttttcacttatttaacgcacagaaaatgagctaaattgattttaaggacgta

SEQ ID NO: 3172 - DNA, 72 bp, Homo sapiens
ccgaagaaagaactcagacctgtatgggaattcaccgttcaagcagaagggtgtttccctttttaaaaaagt

SEQ ID NO: 3173 - DNA, 72 bp, Homo sapiens
atgacgaagctgggacgcagctgggcagacctccccgtgacagcaggagctggggaagccccggtgagcatg

SEQ ID NO: 3174 - DNA, 72 bp, Homo sapiens
atagagaagtgcaggagagtctaattaaatactgtcgtcagccaacgctttcctgaagaagtgactagcttt

SEQ ID NO: 3175 - DNA, 72 bp, Homo sapiens
cacagccactgggcacagggtcagggtgggaggcacgggagggctctgaaaacacagccacacaccctttta

SEQ ID NO: 3176 - DNA, 72 bp, Homo sapiens
ccccaaaacaagaacagagtccgcaaccagatcaacgcgctcacctcctttgtggacgccagcatggtgtat

SEQ ID NO: 3177 - DNA, 72 bp, Homo sapiens
tctgcagagaggagggtaataaagaacctacctcacggggttgttgtgaagttagaatgaacaaatgcatgt

SEQ ID NO: 3178 - DNA, 72 bp, Homo sapiens
gcacttacatcatcccttcctcatcatccctcacccggtgctcatagcagtatcatcatgtaagcacaggaa

SEQ ID NO: 3179 - DNA, 72 bp, Homo sapiens
aaatttaagcacttgttttcctttgtaggtataagcgtgtcttttcagttggaactcatgcgattactacat

SEQ ID NO: 3180 - DNA, 72 bp, Homo sapiens
agtccacacctgaggagttggtcaggtagaaggggcggatgaccgtgcggaagccgttgaagtgccctgccg

SEQ ID NO: 3181 - DNA, 72 bp, Homo sapiens
ggatttcacaattacatacgatatacatctcttctcggcccagtaaattctgagattctatagactttactt

SEQ ID NO: 3182 - DNA, 72 bp, Homo sapiens
tgtgttggatctagggttgtgggaatggggccatacggagtcccagatggggcaccagaacttcaagaaggg

SEQ ID NO: 3183 - DNA, 72 bp, Homo sapiens
ggcctgtggtcactccagaagagggatgaggatgacgtgcccactgtgccgtcgactctgggcgaggagcgc

SEQ ID NO: 3184 - DNA, 72 bp, Homo sapiens
taaatcttagataaagggccattatcagactttcccgttagttacaaacgtctagagtctgggcactacttc

SEQ ID NO: 3185 - DNA, 72 bp, Homo sapiens
ctaattttcgtgggcactttctctttctcctgcagcgcctacactctctaacagtgaatgttagtagaaaga

SEQ ID NO: 3186 - DNA, 72 bp, Homo sapiens
ctattgatcctcccactgtgggccccaagcactgccgttctttgtaagtagctgggggttgcgtttacactg

SEQ ID NO: 3187 - DNA, 72 bp, Homo sapiens
gtagcgttgcggcctcgtggccgggcagctggaagcgcaggacttccaccccagaggccattgtggcggggg

SEQ ID NO: 3188 - DNA, 72 bp, Homo sapiens
cctcagcctccccaaatgctgggattataagcatgcgccactactcccggccttaatactttatttaggaat

SEQ ID NO: 3189 - DNA, 72 bp, Homo sapiens
caaaagacctaagaaaccgctcagctgcaggataacgaggtttttcgcgtgggggaggtggggggtgaggga

SEQ ID NO: 3190 - DNA, 72 bp, Homo sapiens
tacatacctcgattactgcctgtttgctgcttttgcgagcttctttcccactcggctgcgggctgagcaatg

SEQ ID NO: 3191 - DNA, 72 bp, Homo sapiens
aatctgggtgctcctttcaggatgcagagtggcctcgccagccaatgggggaagggggtggaggaagcaggc

SEQ ID NO: 3192 - DNA, 72 bp, Homo sapiens
tctgcctgtattaactggagtggtcgctggttgggcggatgctgtcaagtacttgtgatttgatttgtctga

SEQ ID NO: 3193 - DNA, 72 bp, Homo sapiens
aaatgggaactttggaggccaggcgcggtggctcacgcttgtaatcccagcactttgggaggccgacgcggg

SEQ ID NO: 3194 - DNA, 72 bp, Homo sapiens
gtgaaagctcagactcagaggaagaaagggctcatcgcttagcagaactacaggaacaggtattttgtcact

SEQ ID NO: 3195 - DNA, 72 bp, Homo sapiens
gccctaataccaagtgttcttgggttaaaggcaggcggctttttaattaaatcttaaagcactgcaattact

SEQ ID NO: 3196 - DNA, 72 bp, Homo sapiens
cgccacatcccggaagccgccctttccgctccaaccgcgtgcctgattggacagttcccaggccagcgtctc

SEQ ID NO: 3197 - DNA, 72 bp, Homo sapiens
gtgcattgggtctcaggagcccaggtgggtggctgcggcccaggctcctggcgtcccatggggtacacacag

SEQ ID NO: 3198 - DNA, 72 bp, Homo sapiens
cagaatgaatcaaggtctaacttatgctgactgtccgtgttgcatcatcagtctttggggccccttctcagt

SEQ ID NO: 3199 - DNA, 72 bp, Homo sapiens
acttgcctgatggaatctaaccgtcatgccctccccgtcttggcaccccaacaacttttgcaatattatcat

SEQ ID NO: 3200 - DNA, 72 bp, Homo sapiens
cgaaaacaaggccaagaattatgaaataatgtacacgtggcaaaaactaaggctctttagtaactgcaagat

SEQ ID NO: 3201 - DNA, 72 bp, Homo sapiens
gacggaagctgcaaaaattcaccaggctgtgtggacgggaggaggggctccgggtgagggggattggccgca

SEQ ID NO: 3202 - DNA, 72 bp, Homo sapiens
gctgccacttgccatgtgtggctctgaggaggttgcgtgagtgaccagtgagggggcctcaggaaactaggg

SEQ ID NO: 3203 - DNA, 72 bp, Homo sapiens
ggaagtgggtggcaggacagggcctggactgtcaacgtcagcactgagtgccagccctcctccccatcccac

SEQ ID NO: 3204 - DNA, 72 bp, Homo sapiens
ttcggggagcctgttcctccttgtccttgcagaggcgcgtattgaattttggctgaccgagccttcctctgc

SEQ ID NO: 3205 - DNA, 72 bp, Homo sapiens
cctggggactcccaggaccacaggctgagacgagacgcagggtggctggaggaagtgagaggtgaactcagc

SEQ ID NO: 3206 - DNA, 72 bp, Homo sapiens
caaatggcccaggtggggtgaagccaggggagggacgggcagaaccacgtcaggttcaggacactgcgaagc

SEQ ID NO: 3207 - DNA, 72 bp, Homo sapiens
ggaacttgaggcaagtcaccagcccctgatcatttcgcctaaaagagcaaggactagagttcctgacctcca

SEQ ID NO: 3208 - DNA, 72 bp, Homo sapiens
gctaataactcttttcacaaatttaggagagtctccgagtctgggccttgccactcctcactcagcatctga

SEQ ID NO: 3209 - DNA, 72 bp, Homo sapiens
agagaggttttcagagacgagaagatagtatttagcgaaaatgcttgcagaatgatcagaagactaagaaaa

SEQ ID NO: 3210 - DNA, 72 bp, Homo sapiens
acagatgtcattcatacgcagtgaccagacatggccgttaactgccaggaacacccacctccactcccccaa

SEQ ID NO: 3211 - DNA, 72 bp, Homo sapiens
cagctttctcttagaatgcaaagaacagaagctgccgacacctgaaaataaaagctatgccctgtgctttga

SEQ ID NO: 3212 - DNA, 72 bp, Homo sapiens
tggctgacggcctggaggcaaaccttctcctgtcacgggcatggcctccaataccattcagggccactttga

SEQ ID NO: 3213 - DNA, 72 bp, Homo sapiens
cagctcgctgaccccaagcagtgttcccttcttttcgccaggtttgcatccaagagaggggaggacaggggc

SEQ ID NO: 3214 - DNA, 72 bp, Homo sapiens
tccacactatttcctcagtaagatgtgcgctgttccgtaatacacgacatgtatgggttaactttctgttta

SEQ ID NO: 3215 - DNA, 72 bp, Homo sapiens
atgtgcataccattgtgcaatctctgccattcattcgtcccatccatcactgaggcttatttctcccctctc

SEQ ID NO: 3216 - DNA, 72 bp, Homo sapiens
tgtcttcatgcccaggaagggaaggtcctctcccccgggtccctgagtggtgggggtgtcctcttggatttg

SEQ ID NO: 3217 - DNA, 72 bp, Homo sapiens
gcaccaaggaaagattgtggccggccctctcacctcgccccatctggaactaatgatgcagaagttgtcact

SEQ ID NO: 3218 - DNA, 72 bp, Homo sapiens
ttcatggcctccaggatggtctcgtggatgttctgcgccaccaccgagtcgtccgcctgcatccacagctcg

SEQ ID NO: 3219 - DNA, 72 bp, Homo sapiens
agccactggattgcctcatctttctccccattgcccggatgccaagggcaggacgggggaatggtgtgtctt

SEQ ID NO: 3220 - DNA, 72 bp, Homo sapiens
tatatgattttttttggagggagggtgttggttgccggctgaagagcacttatttaaaatactaaaaaaaga

SEQ ID NO: 3221 - DNA, 72 bp, Homo sapiens
ctacagatcctccctgcttctgttttttttttccacgcaagagaagacaggctgttttcgcaataacttttc

SEQ ID NO: 3222 - DNA, 72 bp, Homo sapiens
aggtgcctagatactatgacatacaaactggcccacgtggctcattacccaatacttcttgctcatcagcat

SEQ ID NO: 3223 - DNA, 72 bp, Homo sapiens
gaagtattatcagagtagagctgacttccagtacccgggcagccagctctgtctccagggaggcctggcctg

SEQ ID NO: 3224 - DNA, 72 bp, Homo sapiens
ctatccagaaacatgactggggagcttgtcacggacgggaagccatttggctcatgagaaaaggggcatgtt

SEQ ID NO: 3225 - DNA, 72 bp, Homo sapiens
gcctcaaataaaacatcaagggtgggcccagaagccgaagggtccagccctgcctgaaattggtcctttgcc

SEQ ID NO: 3226 - DNA, 72 bp, Homo sapiens
tctgttctcttttcggtgtaggcggagggccatcccgcttcagagccctcacttcacacacaggatgttcca

SEQ ID NO: 3227 - DNA, 72 bp, Homo sapiens
tggagagagcagagttcatcctaaacaggaacacacgaatgctgggcctcttacggggctttccttgggctt

SEQ ID NO: 3228 - DNA, 72 bp, Homo sapiens
catccccctctccctgcctcgtgcaaatcccagcacgccgcccaccatatgcagcgatccctcactatcaca

SEQ ID NO: 3229 - DNA, 72 bp, Homo sapiens
gggggtttttctgcttttaaaatcaaaggagttttcgtaccattgcccaaggaaggggcagaccaacaacac

SEQ ID NO: 3230 - DNA, 72 bp, Homo sapiens
tcgagtccatgagagaaaaggaaagggcagaagtgcgaaatgtcacgaatagcgaaagagcatgatgcaaat

SEQ ID NO: 3231 - DNA, 72 bp, Homo sapiens
gccgaacagcggagaccggaggggcggggcccggccgccctgagaagctccgcgggcccggctgggcgagtg

SEQ ID NO: 3232 - DNA, 72 bp, Homo sapiens
ctgattttgaaatcagacacagaaggctttgaagccggccagtaaggggttgtcaggcagttgactaatgct

SEQ ID NO: 3233 - DNA, 72 bp, Homo sapiens
agtgtgactggacatgcagtgctttctcccaagcccggccagcagaggcttcccccttcccacagagtccct

SEQ ID NO: 3234 - DNA, 72 bp, Homo sapiens
ccagcactgcttgaactcaggactgacacgcaggccgagaccatggcctggcttttcagccctacttcttac

SEQ ID NO: 3235 - DNA, 72 bp, Homo sapiens
ccagacagtgggcgccggccagtgtgtgtgcgcaccgtgcgcgagccgaagcagggcgagcattgcctcacc

SEQ ID NO: 3236 - DNA, 72 bp, Homo sapiens
cgcggacgtcagagctggctgctccggcactcagccgggtggttggtccccaggcagccgctggggccctgc

SEQ ID NO: 3237 - DNA, 72 bp, Homo sapiens
tgtactttgacgcagacacgatggactgttatccacgtggcaaacttggaagcaccttgaaagagagtctaa

SEQ ID NO: 3238 - DNA, 72 bp, Homo sapiens
catgaaagcttcctccaaaaggaaagccagaggcacgcaggcctaggttgcctcgccgccccctgcgccttt

SEQ ID NO: 3239 - DNA, 72 bp, Homo sapiens
tgagccgtgattgcgccacagcactccagcctgggcgacacagcaacaccctgtctcatggaagaaagaaag

SEQ ID NO: 3240 - DNA, 72 bp, Homo sapiens
gggaatcacttcttctttctgattcctgcacttcccgcccccacctcaccggccgacctgcccccaactggc

SEQ ID NO: 3241 - DNA, 72 bp, Homo sapiens
ctgaactgcttggaggcagctgacagaaagctatccgctgagggttaaactcatcgaactaacaaaagcgga

SEQ ID NO: 3242 - DNA, 72 bp, Homo sapiens
atccacaaacatgatgatcatatcctcccggtcagcgtatttctccatttccttctttaaccaccggacctt

SEQ ID NO: 3243 - DNA, 72 bp, Homo sapiens
atcagttgtatatatttaacacctaaaaaaattcacgatcaaagtccttcatgcattttatgaggaagttct

SEQ ID NO: 3244 - DNA, 72 bp, Homo sapiens
tgagcagcggggtgggggtggggggttgccatctacgccgttttagtgtgagggacactgggaacgatgccc

SEQ ID NO: 3245 - DNA, 72 bp, Homo sapiens
ctggttagagatttctcacaggtgttctccagacccgaacactgtagttttatgtagattgctcccctcttg

SEQ ID NO: 3246 - DNA, 72 bp, Homo sapiens
accccccccccaggctgacccgttcctcgctctgtcgtccccaggtggaggaggagctgacgcacctccaga

SEQ ID NO: 3247 - DNA, 72 bp, Homo sapiens
ccacctctgctctcagtcaccccgtgaccggcactcgtgatgcctgtccgtcacttcactggccccacccac

SEQ ID NO: 3248 - DNA, 72 bp, Homo sapiens
agaatatagttcaccaaagcagaaacctgggcaagcgtcaactaaatgttggtgggtccaggaagaaatcca

SEQ ID NO: 3249 - DNA, 72 bp, Homo sapiens
ggtttcagaagcttccgttttgcctgactcgcgatcgatctcttcttgcaaggcctttcgcctcacctgagc

SEQ ID NO: 3250 - DNA, 72 bp, Homo sapiens
gttctgcgtgtcacccatgaaaatgtgacagcacccgggaagacgtgggcagcacagacaaacccagcccaa

SEQ ID NO: 3251 - DNA, 72 bp, Homo sapiens
tgtttctaacaccagcagcagaaagcgcttcctcccgccctgggtggctacaggagcagggcctgccagggg

SEQ ID NO: 3252 - DNA, 72 bp, Homo sapiens
cgaacacacaacgtcttggagcgccagaggaggaacgagctaaaacggagcttttttgccctgcgtgaccag

SEQ ID NO: 3253 - DNA, 72 bp, Homo sapiens
atctatgaagcaagagttcactaaggaaacagaagcgctgcgagtgatgtaggtattatggggattcgacct

SEQ ID NO: 3254 - DNA, 72 bp, Homo sapiens
ctctccggagcccagtgttgatcactgaggaccaccggatacaagtccctcctgccttcccctttagtgaca

SEQ ID NO: 3255 - DNA, 72 bp, Homo sapiens
ttgtgtaacatgaaaatcttttctggaccagggcccgtcactgtgatttggcaacacaactggcacatctct

SEQ ID NO: 3256 - DNA, 72 bp, Homo sapiens
cttagcgccccctagaaacttccaaacagaaaaatcgccatttcacaggagagccttgtcataattgccctg

SEQ ID NO: 3257 - DNA, 72 bp, Homo sapiens
cagcacagcagcacttgactagatccaaacagacacgcatcatggggagccagtttgtttgacagggacaga

SEQ ID NO: 3258 - DNA, 72 bp, Homo sapiens
gtaaactcctttccccacctctcctggctggtattcgtggtggtgatggattgataggttgcattgggaact

SEQ ID NO: 3259 - DNA, 72 bp, Homo sapiens
tccctgtgaggaaagtactcttactaccccagcttcgcagatgacacttggaaaacgtaaggacccacagtt

SEQ ID NO: 3260 - DNA, 72 bp, Homo sapiens
gtaactctggcatgaaatgttggtgatcaaaaccacggtggtggcagtgggaaaggaggcaagtggaggagt

SEQ ID NO: 3261 - DNA, 72 bp, Homo sapiens
aaagtcatccacatgcacgaaggcgtcagccggcacgaaggcctcataggtggcccgtgggggccccagcac

SEQ ID NO: 3262 - DNA, 72 bp, Homo sapiens
tgcacaagaatgggggaggggcggctagagagagccggtcaggaccagagcggttgagaaggttgaaaccca

SEQ ID NO: 3263 - DNA, 72 bp, Homo sapiens
gagagcagagagaataaataaagcaaagacccttgcgaaaggaatgactcagctgttcaggatggaggtctc

SEQ ID NO: 3264 - DNA, 72 bp, Homo sapiens
ttgaagaggaaatctaccatttcctgcccaagcagcgcctctgggcccagaggaggttttggtggagtggac

SEQ ID NO: 3265 - DNA, 72 bp, Homo sapiens
atcgaaacgaaaacgaggactttattataaaaaaacgttggaccacgttgggctgggcaccaggacagtgtc

SEQ ID NO: 3266 - DNA, 72 bp, Homo sapiens
gcatctgactcattatcattaggaactgctggatccgttaatttattcatcatgtgtgtattgagcactgct

SEQ ID NO: 3267 - DNA, 72 bp, Homo sapiens
tcaaaaaataaaaataaaaataaaaatattattaccgtatgagctggcaatcctgcttttgtgtatacaccc

SEQ ID NO: 3268 - DNA, 72 bp, Homo sapiens
gaagcccagcctccggcaggcagtatccacatccacgcccacctgctcaggcctgcagcctccagacctcta

SEQ ID NO: 3269 - DNA, 72 bp, Homo sapiens
ttgcgatgactttccttgtagctcagactttttcacgtctgttgttatctctttgggaatgctgaatacata

SEQ ID NO: 3270 - DNA, 72 bp, Homo sapiens
gcttagcccaattaggaaacatctttagtctttcccgttgacattttcactatgcaatctaggcaaaaaaaa

SEQ ID NO: 3271 - DNA, 72 bp, Homo sapiens
acttctgattgcaaagtccatctcctcaaccatcccgggtgagctttcctaaaatagcaaattgttccttac

SEQ ID NO: 3272 - DNA, 72 bp, Homo sapiens
ggcctctcggtaacagcctggcctttgcttctgtccggggcgcgtggcccaggctgagcagtgcactcggct

SEQ ID NO: 3273 - DNA, 72 bp, Homo sapiens
tagctttgttgcgtttcacgaaggacagatcagttcgtctgtataggctataagcaggtaagtagtgcactc

SEQ ID NO: 3274 - DNA, 72 bp, Homo sapiens
agctatgatgaaagcaaaacatacagctggaaagacgatcattggtcaggaccaaaaaacacacacaccttg

SEQ ID NO: 3275 - DNA, 72 bp, Homo sapiens
ggagatgactcatcagagagaatgatgccaatattcggagacatagaaatgagaagtgaagaggtaactcca

SEQ ID NO: 3276 - DNA, 72 bp, Homo sapiens
tagatcaatcccagtggccagaaatgttacagactcgcccacatctttacccaaacacaccaccgagcaacc

SEQ ID NO: 3277 - DNA, 72 bp, Homo sapiens
tgggcccgcgagggacgtgccagctcggccggcggcgtccccgcgccagcgcccctcgcccatgctaatcag

SEQ ID NO: 3278 - DNA, 72 bp, Homo sapiens
ctcaggtgatgttgatactgccggtctagaaaccacgtcctgagaaccatcgtctaaggctagggcaaggac

SEQ ID NO: 3279 - DNA, 72 bp, Homo sapiens
agaaccaaatcatggtaatgattttctcaagtaagcgtcccataattctcttgattctatcatacacactca

SEQ ID NO: 3280 - DNA, 72 bp, Homo sapiens
aggaaattacttatttttttgcgacgacggggtctcgtcctgtgacccaggctggaatacagtggcgcgatc

SEQ ID NO: 3281 - DNA, 72 bp, Homo sapiens
ctctgcattcagagtcaggaagaccagccaagatacggggctggtccccgccccttaacgggatgcggcaca

SEQ ID NO: 3282 - DNA, 72 bp, Homo sapiens
agaaatgatgtaatggccacaggcggctccgcctgcgtcatccatgatttcatcacacacctcgggaggctc

SEQ ID NO: 3283 - DNA, 72 bp, Homo sapiens
agcctgaacaaggaaaacacaaaccctgctcaaagcgtggcaaaaattatacaacatagctaatgctagtca

SEQ ID NO: 3284 - DNA, 72 bp, Homo sapiens
ctctggaaggaaatgattgtgagtgacttgagtttcgtcagatagttgtcagtggagagggactgagatccc

SEQ ID NO: 3285 - DNA, 72 bp, Homo sapiens
tctagttggcactgcgggaaattacaaaatctaaacggtctccaaatcacaaacctccaattgtaaaaatgc

SEQ ID NO: 3286 - DNA, 72 bp, Homo sapiens
gggtcgggggatttccccggagtgctggccagactcggggttcgtaggggaagctcctggcaactgttaccc

SEQ ID NO: 3287 - DNA, 72 bp, Homo sapiens
gtttcaaaatgacttaacaactcttttcaggaaggcggctgctgtggaatggggaacgaagtgtggcagcct

SEQ ID NO: 3288 - DNA, 72 bp, Homo sapiens
gaaaatcagtcatatgaacctggcgcggctgctctcgtcctctcagtcctggcctggtttccattgccacac

SEQ ID NO: 3289 - DNA, 72 bp, Homo sapiens
gtgtgtcttcacaatgctcaccggacaagcagccccggccacttcctgccagggtcccgacttagcagggat

SEQ ID NO: 3290 - DNA, 72 bp, Homo sapiens
tcgtggacagacgactggggccggagacgtccgtccgaggagacctttcagagtgtcagcctactactgtcc

SEQ ID NO: 3291 - DNA, 72 bp, Homo sapiens
cagatgagtagaaagtcgccagccccagccttggccgccacacacatcctggcccgctcctcctgggaaacg

SEQ ID NO: 3292 - DNA, 72 bp, Homo sapiens
gtttatggctagagcggtaggggagccaagtcagccgcttcaggcaattataaggaaatgccctcacataaa

SEQ ID NO: 3293 - DNA, 72 bp, Homo sapiens
gggaggaagcctggactgtgcagccttcgggcacccggcacagacactgtgctggcaggagcttcagacacg

SEQ ID NO: 3294 - DNA, 72 bp, Homo sapiens
aactccctgtcaagctgctctgtgggtttttgaagcgaagtgtgttgctcttcactggctgctctgagctgc

SEQ ID NO: 3295 - DNA, 72 bp, Homo sapiens
tggtctgattgcatcattcatcactgtgggttctgcgcctgcatgctcagatgggaaatctctgctttgttt

SEQ ID NO: 3296 - DNA, 72 bp, Homo sapiens
aaaggaaacaccttgagctggccaggagctaccagcgtctgtctacacctgggtgagccgtactggtcgtag

SEQ ID NO: 3297 - DNA, 72 bp, Homo sapiens
tatctgccagcggcacacagggcacttggccgtatcgctgaagacccgccaggcacagtatctgcagaagta

SEQ ID NO: 3298 - DNA, 72 bp, Homo sapiens
cagagagacgagtgcttaaatcccgagagtccccacgggatggtggggaggaaggctgtggggagagtgtac

SEQ ID NO: 3299 - DNA, 72 bp, Homo sapiens
ttgtctgccctgaccacatcctgtgcagccaggcccggctccctccagggctggtgcaatgcagtggcgccc

SEQ ID NO: 3300 - DNA, 72 bp, Homo sapiens
tcacagcattctatgcgccccagcgccctgggccgcgctggtcttgtatcatttcagtggtccctcccgtct

SEQ ID NO: 3301 - DNA, 72 bp, Homo sapiens
agcacccacgcaggaagagggtgcacacagagggacgcggacaccaaggcctggggttggacaaaattgttg

SEQ ID NO: 3302 - DNA, 72 bp, Homo sapiens
tcccctgggtcactctatatccatgtgtgggcacacgtgtctaagcttgtgtgcactgctgggttttcctag

SEQ ID NO: 3303 - DNA, 72 bp, Homo sapiens
tctgaaatgatgcaatcttctactcaggacggcttcgtaaatatctttcccaaatgatggagaaacagaatt

SEQ ID NO: 3304 - DNA, 72 bp, Homo sapiens
gccgtccctgcctgcggttcgtagcatgggggtgccgtgagccccaaaggagaggacctggaggctgagatg

SEQ ID NO: 3305 - DNA, 72 bp, Homo sapiens
ccctaccccatcccaccacatccattaggactaagcgtagaagatcacttaatatagctcagaccaatcctc

SEQ ID NO: 3306 - DNA, 72 bp, Homo sapiens
ttgtcagtttcttacattgcagtgatttttgaatgcgggcttctgtgcccccagttccgtgattatattact

SEQ ID NO: 3307 - DNA, 72 bp, Homo sapiens
agaaagaagaaatgatttcttggctcatgtcttcacgaacaagggagaaagttgctggcgtggtctcctcac

SEQ ID NO: 3308 - DNA, 72 bp, Homo sapiens
tgaagggcccctgaatagtctgtaaaagggatggacgcccagttgcagaaacaggcattgtgcaaggcactt

SEQ ID NO: 3309 - DNA, 72 bp, Homo sapiens
tactgtgactccgtcctcttgctccataatactgacgtacatttctcagccggcagcagtggctcatgcctg

SEQ ID NO: 3310 - DNA, 72 bp, Homo sapiens
tgtgctgacgcggagtcacggagttgggaagaggccgttttgaggcccgcatcagacctggagcccgagagc

SEQ ID NO: 3311 - DNA, 72 bp, Homo sapiens
ccccggggtcagggttgggatgcgggctctgcaggcgccccggcgaacagctctacctggaggctgtccctg

SEQ ID NO: 3312 - DNA, 72 bp, Homo sapiens
cacactctggattcttacctaagctgtctactacacgcccttctgcccacaaactgcttcaaagctgaagtt

SEQ ID NO: 3313 - DNA, 72 bp, Homo sapiens
atgagagatgacaccagctgcttagcacaaggtggcgccaatgagctttagaataagttgggcttgaccact

SEQ ID NO: 3314 - DNA, 72 bp, Homo sapiens
cagaatttctgtggcaaagggagagagtcagaaaccggagctgtgagaggtgccacatttccctgactatga

SEQ ID NO: 3315 - DNA, 72 bp, Homo sapiens
agggacactgcaggtgtactcggacagcctgctgacgctgcctgccattgtgggcattggcggaggcggggg

SEQ ID NO: 3316 - DNA, 72 bp, Homo sapiens
agctctttacatgtgtctatataaatagattgccccgtttaatgctcacaagttctcctgctccttgtctga

SEQ ID NO: 3317 - DNA, 72 bp, Homo sapiens
tcctaataaatccctctgcttaacagagatgacagcgcactttcacgtgtgttcctcagtccccactccagc

SEQ ID NO: 3318 - DNA, 72 bp, Homo sapiens
cctgggtcttgcagacacctgccctgtggttttctcgtggtggggctgtccccttcatttgtgctctcagat

SEQ ID NO: 3319 - DNA, 72 bp, Homo sapiens
ggggtcccctcccttctggcctcctgatgggtgaacgccagagcagcctcggttcctgtacagcggagggca

SEQ ID NO: 3320 - DNA, 72 bp, Homo sapiens
acacccaacagctggctctcagtcacaggaacacccgtctccatgggaggtgatttacagatacaactactc

SEQ ID NO: 3321 - DNA, 72 bp, Homo sapiens
tggagaccagggtctgatcaatttggctcacacaacggcagagatatgaaggaggccggatttcgcccaagg

SEQ ID NO: 3322 - DNA, 72 bp, Homo sapiens
tatttctaccccatggtctttggctgagtgtgtttcgtattagtcttcttccttttcttgccaggccattct

SEQ ID NO: 3323 - DNA, 72 bp, Homo sapiens
ggggacgcagaatctttcgtcacttccctccatcgcgtctcatgtccaggatcttcccaggagtcgtaggaa

SEQ ID NO: 3324 - DNA, 72 bp, Homo sapiens
tataaaatgatattgagaaattgcccacaggctggcgtctgctgaccgccagcttcagataaccaacgtttg

SEQ ID NO: 3325 - DNA, 72 bp, Homo sapiens
tcctctctgaactgcgtcacagaattacccactgtcgggaaacttaaagatagtttcagtgtttaaaaattc

SEQ ID NO: 3326 - DNA, 72 bp, Homo sapiens
gggtgctccccttgtgctccctgtgcagttcaattcgtgacacccccatacctgtgctccgtgttgctctgc

SEQ ID NO: 3327 - DNA, 72 bp, Homo sapiens
ggcctgggctgctgtgatgcgtcctctttggccgccgctgagggaggtgtttgtaaagctgaggaccactgt

SEQ ID NO: 3328 - DNA, 72 bp, Homo sapiens
cttcccacagcagttacatttgtaaggcttctccccggtgtggataagctgatgcatacagagacggttcct

SEQ ID NO: 3329 - DNA, 72 bp, Homo sapiens
ctgacggcccccatcgtagcctccctcgcaagccgcgccccagactagagagagggcctgcgcattcctgtc

SEQ ID NO: 3330 - DNA, 72 bp, Homo sapiens
accccctcaggttgaagagcccaaatgagctcaaacgtgcactttaaggaaggaagattgcttgcatggggg

SEQ ID NO: 3331 - DNA, 72 bp, Homo sapiens
agagggctggactgtgcatcgtggtgggggttgagcgccagaagccactgcaacagcactttcctctgtgga

SEQ ID NO: 3332 - DNA, 72 bp, Homo sapiens
ctcaggttgggaggggcctacatttccatgtttaccggctcacagctgatgccaaggtcacgctatgaccaa

SEQ ID NO: 3333 - DNA, 72 bp, Homo sapiens
tagaggtcagacccatgataaacttgagcccctaacgaaagggtgtctcgaatttacttgtcctggtggcag

SEQ ID NO: 3334 - DNA, 72 bp, Homo sapiens
tccgagtgagagatttgcttaagccagatggtggccgatgaaggaggcccaggcaaccccttctggtcttcc

SEQ ID NO: 3335 - DNA, 72 bp, Homo sapiens
cctttaacagcccagttaaaagctctttcccaaatcgcggacactcgagatgctcctcgggccatctaaaag

SEQ ID NO: 3336 - DNA, 72 bp, Homo sapiens
tcccagggcaagcagcaccaggaaggggaagaggccgctggacttcatggtgaaggcaggagtgactctgat

SEQ ID NO: 3337 - DNA, 72 bp, Homo sapiens
ctgggacctaagccgcgcgcacacccctttctctgcgtctggtggaggtgcacagaggcttttgagtcaggc

SEQ ID NO: 3338 - DNA, 72 bp, Homo sapiens
tgctgatgtcaatagtctgtgtaccgtttgagaaccgctggattgattctttgacagtttttgaagtccgct

SEQ ID NO: 3339 - DNA, 72 bp, Homo sapiens
aaatatttatgaacatggtcctgtgctcagcctcccggccatgtgtatttggttactcattatcctgatttc

SEQ ID NO: 3340 - DNA, 72 bp, Homo sapiens
gtccaggggcacatgctggctggcagggcctggggcgctgagctgctgtggctttgggcaggtcgtttgact

SEQ ID NO: 3341 - DNA, 72 bp, Homo sapiens
tcactgacgagggcaagggaggagggtgaatcacacgctggagttttccaccaagtacctgccctctgtggc

SEQ ID NO: 3342 - DNA, 72 bp, Homo sapiens
cgtcatgctggatgcctggcgccaaacctccccctcggccacctgcccttcctgctcgcacccgacccctgc

SEQ ID NO: 3343 - DNA, 72 bp, Homo sapiens
ttccccgctctgccacctaggagaggtgcagtatccggttatttaatctcccatgtccggcgagacgcgcgc

SEQ ID NO: 3344 - DNA, 72 bp, Homo sapiens
gcggggctccaccgcgggaggttgcaggaactacccgagtaagggctgttgcatataagggctgttgcaatg

SEQ ID NO: 3345 - DNA, 72 bp, Homo sapiens
ttttagtggctgcatatgtttgcagaagaaggaagcgtggtaacttggcaaacagctccaaacgctcctggc

SEQ ID NO: 3346 - DNA, 72 bp, Homo sapiens
ctacatctccatcttaaagagaaaaaaaggatacacgagagaagagcctgggtatctagaggttatatataa

SEQ ID NO: 3347 - DNA, 72 bp, Homo sapiens
tgtaataaacattactgcaacaaattgcttatgcacgttcattgggggagatgcagttttatctttcctaaa

SEQ ID NO: 3348 - DNA, 72 bp, Homo sapiens
tcctggtttaagtccacggcctggtaagcacggcccgccccttctcacttcctactgtgctctcaccacttc

SEQ ID NO: 3349 - DNA, 72 bp, Homo sapiens
aattttaacactcattaccatttgcagcccataagcgaattgttttgcatagagcctgcattgctaagccag

SEQ ID NO: 3350 - DNA, 72 bp, Homo sapiens
atgggtgcctttctctccctgctctgaactttcatcgtcttcctcatgggagccggggtcctcttccttctc

SEQ ID NO: 3351 - DNA, 72 bp, Homo sapiens
acattgtttcccagccttccttcatatgtggccttcgtgtctgcatatcgctcacactaatactgatataat

SEQ ID NO: 3352 - DNA, 72 bp, Homo sapiens
ggccgcaggcgagagcgagctgggcgtggagagtccgctgtgaggcagaggctgggcctgtgcaagctttcg

SEQ ID NO: 3353 - DNA, 72 bp, Homo sapiens
gccttggggcaagagtggtgggggttgtggctgggcgggtctctgttcctggaatggggcaggagggagaag

SEQ ID NO: 3354 - DNA, 72 bp, Homo sapiens
atgattcgagatgttacaaaactacaaggcctccccgaccttctcccattgctcccgtgttcatgcccccat

SEQ ID NO: 3355 - DNA, 72 bp, Homo sapiens
atgtgtcgtagagggcttgctgaccccaaacatgccgagtcacccacatcctggcctccccgcccactttgc

SEQ ID NO: 3356 - DNA, 72 bp, Homo sapiens
gtgaatgcacaaacgaccgctgaactgagcgtgtccgtgaatgcaccgaccactgaactgagcgtgtccgtg

SEQ ID NO: 3357 - DNA, 72 bp, Homo sapiens
gccctcagctgggaaggtgcgcatccagtgactcccgcatttcaccactctgtgcgtgtccacgaaagcccc

SEQ ID NO: 3358 - DNA, 72 bp, Homo sapiens
acaaacaggtgctgcagcagtgcatggccacgctccgggagctgttcaaggagcaggtgagagagaggaagc

SEQ ID NO: 3359 - DNA, 72 bp, Homo sapiens
ggccccactcaggaagacactttctcaggcagaaccggaatgacaatgggaggccagttgtggagagcctgg

SEQ ID NO: 3360 - DNA, 72 bp, Homo sapiens
gggtaggtccctggggatgggatggtcagagaccccgtggggccaattcgtttacctcttgacatcagtagc

SEQ ID NO: 3361 - DNA, 72 bp, Homo sapiens
accctctccacagttcagcccgccggaggcgtgtgcgcttccagatgagagcacttgttcactgaatgaccg

SEQ ID NO: 3362 - DNA, 72 bp, Homo sapiens
gtgcgtcattctgccttgtggtttctcgtgtggctcgaggccagcatcttgtagttgagctctctttatcct

SEQ ID NO: 3363 - DNA, 72 bp, Homo sapiens
agggagggcagtcatccggtggcttcttgtggcctcggtgatgaaggccacatcagagccagggggaaagga

SEQ ID NO: 3364 - DNA, 72 bp, Homo sapiens
acacagagagaaaggtatctgtggtgagaaatcagcgccttgagtgaaatcactctgggaggagggagccaa

SEQ ID NO: 3365 - DNA, 72 bp, Homo sapiens
cgccagagctgggctgggctcgcggaccgctcatgcgccgtctcccaggagcctccccccagcccagtttaa

SEQ ID NO: 3366 - DNA, 72 bp, Homo sapiens
ggttgcattgagctgtgatcgcgccagtgcactctcgcttgggtgacagagcaagaccttgtctcaaaaaat

SEQ ID NO: 3367 - DNA, 72 bp, Homo sapiens
tatgagtaagagatcctggtttcgcacaaagtgaacgtgcagtacattgtttcagttgttaattcgccatgc

SEQ ID NO: 3368 - DNA, 72 bp, Homo sapiens
agcttagtgtctcctttgctgtggaagcagaactgcgtccccattatttgacaggcaggaaacggtaaggct

SEQ ID NO: 3369 - DNA, 72 bp, Homo sapiens
ccttcctgacctcagtctttattgatcttggtatccgcacctccagtgacgtgtcctgaagggtgggagaga

SEQ ID NO: 3370 - DNA, 72 bp, Homo sapiens
gaggaagcacacggggggctgggagactcagggaccgggagacttggggggctgggagactcgggggccggg

SEQ ID NO: 3371 - DNA, 72 bp, Homo sapiens
gcctccacaggatgcgatcggtccatgcaggcttgcgttttttctcactgcaggggcagggggcataaagag

SEQ ID NO: 3372 - DNA, 72 bp, Homo sapiens
tatgttgtaattattacaccctcctgacatgcacacggtaggagaaaaatctaacctggggcagtagatagc

SEQ ID NO: 3373 - DNA, 72 bp, Homo sapiens
caagccaaggcatccacatccttcccaccatcccacgttgccactaggatgccaattctgggggacacaaac

SEQ ID NO: 3374 - DNA, 72 bp, Homo sapiens
agggtcgggtggcatgcggggcaaggtagcgcagccgggtgggggtgccccggcagcagggccgggaggggc

SEQ ID NO: 3375 - DNA, 72 bp, Homo sapiens
agaagagtagcccaggctccctgaacttgactgcacgttgcagaaccacaccccgctaacggccacaggaaa

SEQ ID NO: 3376 - DNA, 72 bp, Homo sapiens
cgagttccagggtccttgtgatggaagggcgggcgcggcccccacacctggtcttccagccctatccaagga

SEQ ID NO: 3377 - DNA, 72 bp, Homo sapiens
ccggggcatgccgggaggtggggcaagccccaggccgtggagagcggaagtggattccaggagccttctagg

SEQ ID NO: 3378 - DNA, 72 bp, Homo sapiens
gaccactcttgtagcccaccgtgggtggatgaagccggtgggaacagaatgataggagttaaccacttttta

SEQ ID NO: 3379 - DNA, 72 bp, Homo sapiens
ctatgcttccccgtgagcttcctggaaaaaacccccgggagtcgtcagtacccctgggccactgctaacaag

SEQ ID NO: 3380 - DNA, 72 bp, Homo sapiens
ttgtgtatctgcatcgccaagtcatgctcggtgtccgaaagcacaaggccctcagccagtttcttgctaagc

SEQ ID NO: 3381 - DNA, 72 bp, Homo sapiens
ttgtgaagaattgcctagattccttctctcatcaacgggaaagtacttcctctgagagtgcgagtgcaccat

SEQ ID NO: 3382 - DNA, 72 bp, Homo sapiens
ggtgatgactggaaaacctgcatcagaaatcaggtcggaagaggaagatatatatctgatatgtactggaga

SEQ ID NO: 3383 - DNA, 72 bp, Homo sapiens
ggcaacggtgctgccctgagcccctgatctggctccgacactcactagccgtgggaccccaggcaagtcact

SEQ ID NO: 3384 - DNA, 72 bp, Homo sapiens
ctctcccggagccgatgtgttctcagctcctgggccgcagctcctggagttggggccctcctttcttgggac

SEQ ID NO: 3385 - DNA, 72 bp, Homo sapiens
tcccacacagaacagccctggactctgggcctctccgtccgagccagctagcagttcatttcaagtgagaga

SEQ ID NO: 3386 - DNA, 72 bp, Homo sapiens
acaaacatgtgactctccaggaagctggtgaggcccggtctacccccagcagtgaggacatttcagctctcc

SEQ ID NO: 3387 - DNA, 72 bp, Homo sapiens
ccatcagacgccagggacagctcccacgtgccccgcggcctctggcacacggccagacgcccgccaggctga

SEQ ID NO: 3388 - DNA, 72 bp, Homo sapiens
gaggccctgtaggtccagtgggccaggatggaggtcggggacagcccagctgctgctggaagtcctcagagg

SEQ ID NO: 3389 - DNA, 72 bp, Homo sapiens
gcatacaccaggatactgacagagtcagggtattgcgcatttccaccttcacaagaatccagactttccctt

SEQ ID NO: 3390 - DNA, 72 bp, Homo sapiens
agccaggatcatagggtcaaacgtgacaatctgcacgtacgaaatcactcatggtcacctccctcagcatag

SEQ ID NO: 3391 - DNA, 72 bp, Homo sapiens
tgttatcaactcagcagctggaggaagtgacatcacgtgcccaagctcggctttgaagctggaggtgcatac

SEQ ID NO: 3392 - DNA, 72 bp, Homo sapiens
acccggggcgggggttaaggggggggtcctgtccacgcttgcctggaaagcagcccggagccctggcccctg

SEQ ID NO: 3393 - DNA, 72 bp, Homo sapiens
accctcagaaatagacattggcaccctgatctgaccggtgaggacactaaggctttcaggcataacttgccc

SEQ ID NO: 3394 - DNA, 72 bp, Homo sapiens
tcttttccttttctcgttgctgcccagggaggagacggggtgacctttcccacaggggcagcctgtggcgat

SEQ ID NO: 3395 - DNA, 72 bp, Homo sapiens
ttaagagtactcgggtgtcctccagtgtagttccacgttctccaaccgtcgctctggcgacccttcgatccg

SEQ ID NO: 3396 - DNA, 72 bp, Homo sapiens
cgaggccagccacgtccacctcgatcacgtcacctcgtgggcagaatggcctacgccccatgtcctcccagc

SEQ ID NO: 3397 - DNA, 72 bp, Homo sapiens
aggaaagaaatgatgagggtgcagcgttggtggaacgtgtggccaaatggtcatgcattcctagacattatc

SEQ ID NO: 3398 - DNA, 72 bp, Homo sapiens
cccttggatgctctggctggtgactcactaggtcacgtgtccccaaaatcaactggcttgaagttgagcaaa

SEQ ID NO: 3399 - DNA, 72 bp, Homo sapiens
agtcccagtgcacacccagctgctcagtgccacctcgtgcacccagggccacttcagccttgatcacaggcc

SEQ ID NO: 3400 - DNA, 72 bp, Homo sapiens
acaacataaaagcaattgctaaactctactgtaaccgggatatggttaattccgagcttgggaaactagatg

SEQ ID NO: 3401 - DNA, 72 bp, Homo sapiens
gctgttacacaagatgttaccatatgttcatttcacgagacctcacacatgctttaaggaccatcattattt

SEQ ID NO: 3402 - DNA, 72 bp, Homo sapiens
ctaaagaaagttgcttttgaactccataagctgctcgaggtcaggtactgccttgtcctgcatctccagctc

SEQ ID NO: 3403 - DNA, 72 bp, Homo sapiens
ggtagctttgaccacggagagaggaccctgccctgcggtgacagggcatgaggtgacaagatggcagagacg

SEQ ID NO: 3404 - DNA, 72 bp, Homo sapiens
tctgtttcccgcatgtccctgggaacggaatgtctcggtgtaaagccgactattcgttctattttgagacag

SEQ ID NO: 3405 - DNA, 72 bp, Homo sapiens
aaaggtttctattttcctactttttttctttatcacgtgccaactaagcctttttttctacactcccttaaa

SEQ ID NO: 3406 - DNA, 72 bp, Homo sapiens
aggaagctgccagctaagcggctactggaaactcccgctgaggatgcggcaccaggaacacaaccttatgac

SEQ ID NO: 3407 - DNA, 72 bp, Homo sapiens
cctggagccctttgtctacttggccagcaagatgacgcaaccccagagcaagtctgccttccccctcagccg

SEQ ID NO: 3408 - DNA, 72 bp, Homo sapiens
agccttggtcacacttggtaccagaggcagggggtcgtccagccagcaggcctccagggcactggggagctt

SEQ ID NO: 3409 - DNA, 72 bp, Homo sapiens
gacgaaggtaaagtcccgtctcctgcagttgttgacgttcagtaggtcgtcggttaagaaaagtggctccct

SEQ ID NO: 3410 - DNA, 72 bp, Homo sapiens
ccaagtaggcctgaaacgtcttgggctttgaaatccgcaccatggcgggggccgggggcagtggccccacgc

SEQ ID NO: 3411 - DNA, 72 bp, Homo sapiens
ccagctgatgtgaaagcaaagttggccagaggtcacgtgagggaagtctgctaggatgcctgtctcagtctg

SEQ ID NO: 3412 - DNA, 72 bp, Homo sapiens
gacaagacaactcctttggaagtagttttactaaacgtactatactacaaacttgagaaaaagttttaattc

SEQ ID NO: 3413 - DNA, 72 bp, Homo sapiens
gtgtcttgtagttctgttttcacttttcttatgtgcgggtcttgtctgcctcttaagctgtgagtcccttaa

SEQ ID NO: 3414 - DNA, 72 bp, Homo sapiens
atgatttctcaaagcagttaaatacttttccaagacggagaatgcaaccaggctgctgggtacctctccagc

SEQ ID NO: 3415 - DNA, 72 bp, Homo sapiens
ggccaggcacttgcggaccttgggccccaccacctcgcgctccccccggcacacatactcaatctcatagtc

SEQ ID NO: 3416 - DNA, 72 bp, Homo sapiens
cccgggacctctggacatcctccatcccggtttggcgggaaactgacccaggagaaagtgtttgcagaggtt

SEQ ID NO: 3417 - DNA, 72 bp, Homo sapiens
gacctgtcaccacctttaatctattgatgctcatacgcccaggtcacagccctcaaatcaagccaaatatag

SEQ ID NO: 3418 - DNA, 72 bp, Homo sapiens
accacttggatgactattgcaaagtaagccttcttcgctcggattctatgtttcatgagggtaggcactgga

SEQ ID NO: 3419 - DNA, 72 bp, Homo sapiens
ccccgagccaggccctggaagagaagtcaacatcacgagctgccatctggggggtggcaccaggctgtgaag

SEQ ID NO: 3420 - DNA, 72 bp, Homo sapiens
tcctcaccctgtccagcctccctgaccccatgtcccgagggtgacctccctgactggtcagtgtggctttcc

SEQ ID NO: 3421 - DNA, 72 bp, Homo sapiens
tcagacaaaatccacgagtaaagtccgtgtggaggcggctgagaaaggctttgtattgcaacagaggagcag

SEQ ID NO: 3422 - DNA, 72 bp, Homo sapiens
ggctccgttttgttgtaaatccaggacacgtttgacgtcagggctggttgtgtttctcatggcaaatgaaac

SEQ ID NO: 3423 - DNA, 72 bp, Homo sapiens
cagtggccgcagggtatcggcaggcagcctcgagacggggcacccaacccccaagcctggagccagcacctc

SEQ ID NO: 3424 - DNA, 72 bp, Homo sapiens
tgcttctgcagaggaagttcaagaaggtacgccggcgctcccccgcctccaggccagagtctccgtcctccc

SEQ ID NO: 3425 - DNA, 72 bp, Homo sapiens
cagttttgttgcccatatttggtgctgatgttatccgacatccctttcaaacattctattaaaaacctcaag

SEQ ID NO: 3426 - DNA, 72 bp, Homo sapiens
gtgaagccgattgcggaatacagaaaacaggcagccgttgcaggggctggtgctgtggcctctgcacttgcc

SEQ ID NO: 3427 - DNA, 72 bp, Homo sapiens
cgagtctgtcagtcttgcctcattaagtgtatggtcgaatttctgtcactcgaattctgtcactcaaagctt

SEQ ID NO: 3428 - DNA, 72 bp, Homo sapiens
aacagatagtcaagttgtcccagtgggggcctggccggagggccggcactccgtgggaaagctgctaatgct

SEQ ID NO: 3429 - DNA, 72 bp, Homo sapiens
gctacaggctggggccacggtcacccctgggcacacgcccccacccccaccttcaacacccccagtgcctcc

SEQ ID NO: 3430 - DNA, 72 bp, Homo sapiens
gtggacaagggcagctttgtccactgtgttttaggcgggacttcctgggcctgcccaagccctgctggagaa

SEQ ID NO: 3431 - DNA, 72 bp, Homo sapiens
ggattgatgaggcgggcgggccaatgagctgcgcgcggcgcctcggcgcgccctccgttggcgcggcggctg

SEQ ID NO: 3432 - DNA, 72 bp, Homo sapiens
tgtactcatagctggaggcatcagtcattgcactacgagaggaagtgggctttgaaataccttggggttgat

SEQ ID NO: 3433 - DNA, 72 bp, Homo sapiens
gtctcccaagtgctgggattacaggcatgagccaccgcacccgaccacaacccagctttataagggttgtaa

SEQ ID NO: 3434 - DNA, 72 bp, Homo sapiens
cgcctagagctgtgcagccggctcgaacgagaggccgcccgacttgcagacctaggttgagcagagctccac

SEQ ID NO: 3435 - DNA, 72 bp, Homo sapiens
aaggggatgacaaaaacacaaaaatcaagtaatagcgaagatggcaatgacagttaagcaaacaaagaaaca

SEQ ID NO: 3436 - DNA, 72 bp, Homo sapiens
gtggggtctatgttccctccccttgaatctgggcacgggccatgactgttctgaacaacagagtttaaagga

SEQ ID NO: 3437 - DNA, 72 bp, Homo sapiens
cctcaaacccagatctcataatcacccttgttggacggactcttgctgtagcaatgaaccaccagcgctgcg

SEQ ID NO: 3438 - DNA, 72 bp, Homo sapiens
gcagagaaaagacataaatttgtcaggttttgagacggagagattaaaacaaacaaaccaggacagggatgc

SEQ ID NO: 3439 - DNA, 72 bp, Homo sapiens
agtgtttggaaagaggaaaaaggagtggtactgggcgtgtctgtgggctttcaagccctttatcatgcctct

SEQ ID NO: 3440 - DNA, 72 bp, Homo sapiens
agttccttccaccaaagctcaactattgctgcaagcgctttggtaatcacgagcattatctatgaagctact

SEQ ID NO: 3441 - DNA, 72 bp, Homo sapiens
aatgataacagctacctttcactgggccctcacttcgtgccaggcactgtgtaaagggactttacgtttaat

SEQ ID NO: 3442 - DNA, 72 bp, Homo sapiens
gcttgagataaggctgtgaaaacaaaaaatgtagccgaggtgctaaggagagttatcttaacagggctagtc

SEQ ID NO: 3443 - DNA, 72 bp, Homo sapiens
gcctggattgccaaagagcagccccaggaagaggccgggggtccgcttgcgattccccagccaggatgcccc

SEQ ID NO: 3444 - DNA, 72 bp, Homo sapiens
aatgcaggagtgcagaaagtattttaaaatgctttcgaggaaacttgctcaacttcctgatagatgtacact

SEQ ID NO: 3445 - DNA, 72 bp, Homo sapiens
gtgtgtgtctcaatatacctatttttttagagaaacgtgactagaagagaaattactctggaaaggttgatg

SEQ ID NO: 3446 - DNA, 72 bp, Homo sapiens
ctggttcgagcggtgaagccgcgctcccctggaagcgacccaggggaggccaagttgtcagctttttgatcc

SEQ ID NO: 3447 - DNA, 72 bp, Homo sapiens
aaggctgggtggggcccccgaacaacgaggctgctcgcaccgggagtaatagggctgcgggaattcaaactg

SEQ ID NO: 3448 - DNA, 72 bp, Homo sapiens
acattccaaaccacagtgaccgtgtcagtctgtttcgtctggcttttgtcatttcttcggaaaaacatcatt

SEQ ID NO: 3449 - DNA, 72 bp, Homo sapiens
gcgagatactggaggtctctggtgatagaaaagcacgctggccaatggcaagaaccaaaaggaggggaaact

SEQ ID NO: 3450 - DNA, 72 bp, Homo sapiens
ttcctggagtcttacaggcctcgtttttatgtacacgtcatggaaaagaataaaagggtaaggtcgcggggc

SEQ ID NO: 3451 - DNA, 72 bp, Homo sapiens
actgaacgaggcccctgccctggggaaatgctggacgccccaggctgggagttttgaaggccacagggcaag

SEQ ID NO: 3452 - DNA, 72 bp, Homo sapiens
tcactgggcttccaggcctcctctgggactgtccccggccagaactctggctcattcggcctcggtccctac

SEQ ID NO: 3453 - DNA, 72 bp, Homo sapiens
cactgttgactctctaccaggtggcactatatgcccgcgtgtgccataggttagagcctctgccggggctgg

SEQ ID NO: 3454 - DNA, 72 bp, Homo sapiens
agtagttgctcaacaaaaatgtgcgaagtgaaactcgaacaggcggtcaggctcacagtccacgcctcttcc

SEQ ID NO: 3455 - DNA, 72 bp, Homo sapiens
agagggcagcattgtgttggtcaatgttcccttggcgagcaattgaaacttgtttaggccctagggttgagc

SEQ ID NO: 3456 - DNA, 72 bp, Homo sapiens
atactcagaaatgcaacctctcagaactgctttaacgaaactttgagctgtggctcaccaccctcagacaca

SEQ ID NO: 3457 - DNA, 72 bp, Homo sapiens
aaatccttcccctcttccaggtgttctcagcctttcggctgccaactgtggactttgcccttgaaattcaac

SEQ ID NO: 3458 - DNA, 72 bp, Homo sapiens
ctctaggcagagcctgagcccactattgctccagccgattcctgggtcctggttagttcacaacagcaccag

SEQ ID NO: 3459 - DNA, 72 bp, Homo sapiens
ccgtagtgaataagctgggcttgggcttgccagaccggaaggtatctgtcacaataggtgtgactgtatgta

SEQ ID NO: 3460 - DNA, 72 bp, Homo sapiens
ggggactcccagtcatcactgccaccagggcgcagcgcctgatcaggagctggcaggggactcccagtcagg

SEQ ID NO: 3461 - DNA, 72 bp, Homo sapiens
atgggagctgctggctgttgtttttggcttgaggccgcatagaccagccagccgttgtgtaagcatggtctg

SEQ ID NO: 3462 - DNA, 72 bp, Homo sapiens
attctagccccgttatctccccatcagggcaccttcgttttcccctccacacccttccttcctctgggggac

SEQ ID NO: 3463 - DNA, 72 bp, Homo sapiens
ggctggggcctcatatgcactgcctgtgcaccaggcgagtctgtgggcaaatgagctccagcttgccatggt

SEQ ID NO: 3464 - DNA, 72 bp, Homo sapiens
ctcttttcctgtggtccaagtgatttctaagaggccgtagctcagtgatgctggcaggatgcaacccttttc

SEQ ID NO: 3465 - DNA, 72 bp, Homo sapiens
gcagctgatgcaatctgcaagagaagaaaaccagccgaggtaggatgactcccaagtttctagcaccaagtt

SEQ ID NO: 3466 - DNA, 72 bp, Homo sapiens
tgaagattaactcaagaactctatgtacattagttcgctagggctgcctaacaaaatacaataaactgggtg

SEQ ID NO: 3467 - DNA, 72 bp, Homo sapiens
cattcattgaagtgaacaaacattctggcacagaacgaaattattgctcaacatctgattctgttgggctgt

SEQ ID NO: 3468 - DNA, 72 bp, Homo sapiens
acaaaagcagcacttccccctaaaaatgcagtagccggtgatgcatctgggcacatacgaatgcactcagat

SEQ ID NO: 3469 - DNA, 72 bp, Homo sapiens
atgtcagttggttagggtaggagttggcacccgttcggaaataggagaacctgagagtgcagtcctgcccag

SEQ ID NO: 3470 - DNA, 72 bp, Homo sapiens
gttatgcacacactgcagaaaacaaactcgcagaccgataacctaaatggttgaataagcatcaaactggta

SEQ ID NO: 3471 - DNA, 72 bp, Homo sapiens
tacagcccccaatgcagctattattgggttgcctccgggaagggggtcgtaattaggatttggcttaagtta

SEQ ID NO: 3472 - DNA, 72 bp, Homo sapiens
tatgcaaatgacttctttccctcctgtgtctgacgcgtgggccaggaggctggacaacagctggacctgcct

SEQ ID NO: 3473 - DNA, 72 bp, Homo sapiens
ggccccagcccctcccttcctgcctgggtcctgcccgctgccagccaagcctttggccagctctgggactgc

SEQ ID NO: 3474 - DNA, 72 bp, Homo sapiens
ccgcttcagcagcggctgcgtgccaccccacagagcggccaccagcaccagagccaacacctgccctgaatg

SEQ ID NO: 3475 - DNA, 72 bp, Homo sapiens
caaaaaatgctccaataacaaacaaaaaatgtgtgcgcgctcgcttgctttctctctcccagacacacacac

SEQ ID NO: 3476 - DNA, 72 bp, Homo sapiens
cagaagacaaagcgagcacccccaccccaggccaacgccatcctctgtacacaattacaacacaggtccaga

SEQ ID NO: 3477 - DNA, 72 bp, Homo sapiens
agacccgcatgaacaatttatcaaacatgagatagcgtgtgtgtttatgagtgtatttgtggtcacactgat

SEQ ID NO: 3478 - DNA, 72 bp, Homo sapiens
gtcccatcgaccacccaagcgctgaggagtgcgggcgcacggtgcaggactggcaggcagctccacctgaag

SEQ ID NO: 3479 - DNA, 72 bp, Homo sapiens
tgctgaaggggtttccccccagtggggtggccagccgatctaggattccagccgccttgcacaaagctggaa

SEQ ID NO: 3480 - DNA, 72 bp, Homo sapiens
gatgagacacaagctgttgccacatcagcactttgcgcctggacggtcccccagttgtcctggctgcaggca

SEQ ID NO: 3481 - DNA, 72 bp, Homo sapiens
tgggcggtagggtttgaaccccgggctccagtgcccgtgagttttgggggcttgggtttgctggccgcccct

SEQ ID NO: 3482 - DNA, 72 bp, Homo sapiens
gcgccgggggaggaagccgcgcggggagaccctggcgtggcccgcgccgcccaggatgactttcctggcaag

SEQ ID NO: 3483 - DNA, 72 bp, Homo sapiens
ccaggtcccagccagtcccgagactgcggtgtggccgcctaaaacatttccaaacacaaaactcatcgtggc

SEQ ID NO: 3484 - DNA, 72 bp, Homo sapiens
caatgggaaatgactgtcggggaaccctctgcagccgtccttgtcgagggccccagatggggtgtgggtggc

SEQ ID NO: 3485 - DNA, 72 bp, Homo sapiens
cccgggaagccactccttccccttagtgatgactgcgtgttttgtggggagattccttgacaccctgtaact

SEQ ID NO: 3486 - DNA, 72 bp, Homo sapiens
acccgcggccccaggcccacctgagactctatgcccgtccacccgcggccccaggccctcctgagactctat

SEQ ID NO: 3487 - DNA, 72 bp, Homo sapiens
taacagttgggctttgtccctcccccaatctcagccggggacagaggaaggacattttgtgctacagcagct

SEQ ID NO: 3488 - DNA, 72 bp, Homo sapiens
tactccattttacggagaaggaagatgaggcccagcgaggcttgggggctaagatttcacaataagtcagca

SEQ ID NO: 3489 - DNA, 72 bp, Homo sapiens
taacctataatactctggttacaccctggagactacgcctgtgtattttcctgatttggctatactcgaccc

SEQ ID NO: 3490 - DNA, 72 bp, Homo sapiens
tagggcacaggaaacataggacctggggtgaccaacggctgcaggcaggtctggaagaaccagtcatgcatc

SEQ ID NO: 3491 - DNA, 72 bp, Homo sapiens
ttggtggtagttctggcgcacctgcgaggtagacgcggtcgtcatgccggcgactaaggagaggcggcggca

SEQ ID NO: 3492 - DNA, 72 bp, Homo sapiens
cacctggaacagctccaggctgggatctgatgccacgtgtgtgtgcgccacacccactgtcttccaaagaac

SEQ ID NO: 3493 - DNA, 72 bp, Homo sapiens
aactgctaggtttacatctacaacacagctggaaacgctcactggatcttcacccacaccccgtttaatctc

SEQ ID NO: 3494 - DNA, 72 bp, Homo sapiens
cctagcccagttagaaaataagtctgggccggcggcggtggctcacacctgcataggcagtgctttggccag

SEQ ID NO: 3495 - DNA, 72 bp, Homo sapiens
attttgaggaactgccagactcctccagtcctgttcgatttgaagatgaaactgggcttagagaaagtgggt

SEQ ID NO: 3496 - DNA, 72 bp, Homo sapiens
gcttcatttccaaacgcctgtggccagccgggagacggcgctgccgaggtgaagaaagcagacccacgtcgt

SEQ ID NO: 3497 - DNA, 72 bp, Homo sapiens
ccgacccctctctctccaccccccacccccgcccccgcttctgtctccctagggactggtgattgcagctgg

SEQ ID NO: 3498 - DNA, 72 bp, Homo sapiens
gctcagaaccacagacatatctccctgttttggggcgttctctctgcccagagctaaggttcctgggagtag

SEQ ID NO: 3499 - DNA, 72 bp, Homo sapiens
gaaacaggggaaggaaaagctcacacacacacacacgcccacgcgcacacaaagcagggtacagagagaaaa

SEQ ID NO: 3500 - DNA, 72 bp, Homo sapiens
tcaaagtctgccctaaggtccagatctcctacccacgtaggagacttctagtttcacaaatccccgatgtcg

SEQ ID NO: 3501 - DNA, 72 bp, Homo sapiens
gcctcctgcagaggcctagtgagaagcctggccctcggccacacaggatggaagacagattgggttccacag

SEQ ID NO: 3502 - DNA, 72 bp, Homo sapiens
acaagattggaccaatcctttttgcaccaaagtgccggacaacctttgtggtgggggggggtcttcacatta

SEQ ID NO: 3503 - DNA, 72 bp, Homo sapiens
aagctctgtccctttagaggcagggagggatgaaacgctcccctcacataccatagagtgtggtccccacat

SEQ ID NO: 3504 - DNA, 72 bp, Homo sapiens
ccgctatggattctgtaagtgttccaagacagcaacgcctcatgtagtgactcagcaatccagattgcttta

SEQ ID NO: 3505 - DNA, 72 bp, Homo sapiens
ggaaggcgcttttagcgggggcgtggcgaggccctcgggtttcccagccccctctcaacccggggaccggca

SEQ ID NO: 3506 - DNA, 72 bp, Homo sapiens
agtgagtcctggagcctctggagtccgcccctcaccgatgtgtgttctggggcaggtcacttcctctttctg

SEQ ID NO: 3507 - DNA, 72 bp, Homo sapiens
gtccagagaccagcaggttgcacaatgacctacagcgattgcaaaaggaactcacaactgcagatcttaaga

SEQ ID NO: 3508 - DNA, 72 bp, Homo sapiens
tgaacccgggtgcccgggctcggacagaggccaggcggctttctgccggggcctgtttcctgttggggcaag

SEQ ID NO: 3509 - DNA, 72 bp, Homo sapiens
gagacgtgactaattatctgctgaatgagccaccccgttttcgaggaaattaggttttaaaaatagtcgggg

SEQ ID NO: 3510 - DNA, 72 bp, Homo sapiens
aggaaggaaagaaagaaaaaataaaagagtgaaaacggactggagaagaagaaaccacagttgctgctatat

SEQ ID NO: 3511 - DNA, 72 bp, Homo sapiens
ccactcagccaatatctgcacaggtggcggttgcccggtcaagggcgggctcacaatctgcggggcggggag

SEQ ID NO: 3512 - DNA, 72 bp, Homo sapiens
aaaactagaaaatggtactttttttggatttatgacgagaaatactgtgggtttaagaggcaactggaatgt

SEQ ID NO: 3513 - DNA, 72 bp, Homo sapiens
ctgccagtaagtgtgaagatcccgtgtgccatgcccgagaagccctcattaattcaccagagggggtgatgt

SEQ ID NO: 3514 - DNA, 72 bp, Homo sapiens
cctaaatagcattattttgtcatgttagattgactcgtgaaattaaattccttcatttatttccttccattt

SEQ ID NO: 3515 - DNA, 72 bp, Homo sapiens
gggcactggttacaggccaggaggcaatattcacacgtagatgtacatctgtaaatgcatagactttctggg

SEQ ID NO: 3516 - DNA, 72 bp, Homo sapiens
caaggtagctgctccgcagatgtgatgacaaccaccgtgtgtttctcagaatcctaggaaataagggcttct

SEQ ID NO: 3517 - DNA, 72 bp, Homo sapiens
ctgtcacctccgcctctgcagaaggagggtgatggcgcgcaggggtcaggcacaccccgggtgctcctggag

SEQ ID NO: 3518 - DNA, 72 bp, Homo sapiens
gggccagggtctgcagtggatgagcaccaggacaacgtcttctttcccagtgggcgacccccccacctggaa

SEQ ID NO: 3519 - DNA, 72 bp, Homo sapiens
gtagttcaggcacaagacaaacccacctgaatggacgaggaacactgtctgttgccatggcagcctgatcta

SEQ ID NO: 3520 - DNA, 72 bp, Homo sapiens
ctggccctgaggacactctctcccgggcaggagtacggtgttcccttcctggagaccagcgccaagactggc

SEQ ID NO: 3521 - DNA, 72 bp, Homo sapiens
gtgccttggtctactcccatttgaagtgtatctaacgggtaaacactcagtcaccacatgaatagggacatt

SEQ ID NO: 3522 - DNA, 72 bp, Homo sapiens
accagcagagctgctcccaggcaaagccaaagaaacggcctggccaaactccaccttcctgacaaaggcacc

SEQ ID NO: 3523 - DNA, 72 bp, Homo sapiens
gctgcgccatggcttcctctggacagttctgctggcgtgccctgcttggcggggtacagtggggcaagcggg

SEQ ID NO: 3524 - DNA, 72 bp, Homo sapiens
gggcagcggaggcctggcggggacggggagccgctcggggactgcaggcccgtaggtcgctccctatccgtg

SEQ ID NO: 3525 - DNA, 72 bp, Homo sapiens
taaaactcaggatgagcttgactcacgataacagacggagcgatcaggggaggcaatgttagctgttatggg

SEQ ID NO: 3526 - DNA, 72 bp, Homo sapiens
ggcttgttaaccttactttgtagaggaggaaccaacgacttggagttacgtaacttgcccaaggttaaggtg

SEQ ID NO: 3527 - DNA, 72 bp, Homo sapiens
tgtggctcgctggtctcgagatggctgccttgccccggctgtttcatctgcattccaggcaggaaggtcgag

SEQ ID NO: 3528 - DNA, 72 bp, Homo sapiens
cacagaggggtgggcttcacaggaggtggctgccacggcggggccgggtgcccgtgccccatcctgaggccg

SEQ ID NO: 3529 - DNA, 72 bp, Homo sapiens
agtggctccggctatgcccccgagcctgcaggctacgccacggtctggcggctgaagagctcgagggtgagc

SEQ ID NO: 3530 - DNA, 72 bp, Homo sapiens
ggcaacagtgcaagtttcagaacaaactttggtcacgtaaatctttgggaagtaagtccagtacctcattcc

SEQ ID NO: 3531 - DNA, 72 bp, Homo sapiens
gtcgaatctggagccggccttggttccccacagcccgtgacaaggagtgtggagcttcacccgggaggctct

SEQ ID NO: 3532 - DNA, 72 bp, Homo sapiens
atgacatggaaacctctgattgcaatacaatgagacgaatgctggttgacacacctacaatatatgaccagc

SEQ ID NO: 3533 - DNA, 72 bp, Homo sapiens
cctccttgcctggcttcctgaggtttggcctagggcgatgtgcaggcccctcctctctgcacagagccttcc

SEQ ID NO: 3534 - DNA, 72 bp, Homo sapiens
cctgcagggaatgcactcaattgcctaatagttctcgtcaccttgtgtttcagtagccctatgactaacgct

SEQ ID NO: 3535 - DNA, 72 bp, Homo sapiens
cctatacaatgatctcatcttattcattttcaggacgttatccctgggcctctgtgggatggctagggggca

SEQ ID NO: 3536 - DNA, 72 bp, Homo sapiens
cttcctggtttagtaagatgtttgatttgactcaccgaaaaaaatggcctgggaagagggaagccttgcctt

SEQ ID NO: 3537 - DNA, 72 bp, Homo sapiens
gggtgtctttaagtgcactgggctgggctaggcaacgcagctcgtgtgtcccgggaaagctgcagtctgctg

SEQ ID NO: 3538 - DNA, 72 bp, Homo sapiens
tacctactcagagtgtcacatgccacaagccagagcgtcttggcagttctcagcaccttgacatcacttcct

SEQ ID NO: 3539 - DNA, 72 bp, Homo sapiens
gatatcctgtttttccaggggactgcctccttcctcgcctttaagcctttttaggcttttaagccgcaggca

SEQ ID NO: 3540 - DNA, 72 bp, Homo sapiens
tcagagcgtatgtaactagctgtcaggtctttccccgttgcctcagcctttctacacagactggccttcaac

SEQ ID NO: 3541 - DNA, 72 bp, Homo sapiens
cattcataaggagaagacaatactgtctcaggcctcggggtgtcctgcagttcacaaagttttgtttctgaa

SEQ ID NO: 3542 - DNA, 72 bp, Homo sapiens
aagaacccggggggctccgaggcttaccattggtccgcaggcccctccgtgccgggcacccacctccagctc

SEQ ID NO: 3543 - DNA, 72 bp, Homo sapiens
aaacacagtcaccacctgggttcctcctttccagtcgtttctcccagcactttcctctctgcacaagggagg

SEQ ID NO: 3544 - DNA, 72 bp, Homo sapiens
cgttttcccacagagcaagtgagaaggcccgtggccgcaaatcacaagcgccagctcagagctggctggcgg

SEQ ID NO: 3545 - DNA, 72 bp, Homo sapiens
catttagtagggcttgttctctaaccacctctctccgagagtttcaaagggagtgggatctggggaaggttg

SEQ ID NO: 3546 - DNA, 72 bp, Homo sapiens
agctgcccacaaggaagcgcccttggttacttccacggtggggggcctcttggaaacctccaatctggaaag

SEQ ID NO: 3547 - DNA, 72 bp, Homo sapiens
aattctgttcctaagcaaggtccatctccaggggccgttcacggtgatcagctgtctccctcagccaggaaa

SEQ ID NO: 3548 - DNA, 72 bp, Homo sapiens
ctcaatggcgaaagataaagtttttcctctaagatcgggaacaaggcaagggtgcttgctttcatcacttct

SEQ ID NO: 3549 - DNA, 72 bp, Homo sapiens
acttttaaaacaccaacaacactgtttaaaaagcacggtctatttaaaaagatgcttttgatttgcctccat

SEQ ID NO: 3550 - DNA, 72 bp, Homo sapiens
gtaagttcagagttctgggcgcctgtcccatgtagcgggagactttgtccaggcaacgggactcaggttggg

SEQ ID NO: 3551 - DNA, 72 bp, Homo sapiens
ctgggatagacagcttccttaacacttcctccttccgtgtagccctctgtgactccaagttcccggtataat

SEQ ID NO: 3552 - DNA, 72 bp, Homo sapiens
tcaggccgtcttctcaaatagacttacccacccatcgtaaacaaactgcatcatgcgaactcattccttcca

SEQ ID NO: 3553 - DNA, 72 bp, Homo sapiens
tattacatcacatatgagcactgatcaaaggctagcggcaattaccaccatagctgagagctgagggcttaa

SEQ ID NO: 3554 - DNA, 72 bp, Homo sapiens
tgcagctctatttccttctttaagctgcagtagagcgctccattatgtaattattaccacagtgtttctctt

SEQ ID NO: 3555 - DNA, 72 bp, Homo sapiens
tgacctccagaggagcctccttcctccactgccctcggagaacagtgccccttccccggaggagccagtata

SEQ ID NO: 3556 - DNA, 72 bp, Homo sapiens
ttctgcacgggctgaccccagcgagcttcgtagctcgggcccagcctgctggtgtcgtttgcctaaatgtgt

SEQ ID NO: 3557 - DNA, 72 bp, Homo sapiens
cagctgcctaggggaaggagcattcaacgaagccccgtaactttaagtccctaagggctgtgggtatagaca

SEQ ID NO: 3558 - DNA, 72 bp, Homo sapiens
gcatcatatttcaccccaaagccttgaatgactaacgcaccacttggggatgggcagaccaatgttcacagg

SEQ ID NO: 3559 - DNA, 72 bp, Homo sapiens
ttctagtagtctagtaaatcgactgtctcttcatccgaaaacctggatttctagtcccagattcaccactta

SEQ ID NO: 3560 - DNA, 72 bp, Homo sapiens
tgtgctggtgacaagcactctcatattcttagcttcgttacttctgtttgtttgtttgtttgtttaaatcac

SEQ ID NO: 3561 - DNA, 72 bp, Homo sapiens
ctcgcagatggcaagctgcgcttcgtggtggagcccgtggaggcctccttcccacagctcctggtttacgag

SEQ ID NO: 3562 - DNA, 72 bp, Homo sapiens
gtctcataaatagaaaataatttggtggaggtggccgcataaggggtgatttgtggtgactttggtagtgca

SEQ ID NO: 3563 - DNA, 72 bp, Homo sapiens
ttgcatgtcagcagggtggctgagctggaccgtcacgcgcacgatcaggaacaaccgctcgtccacgggcgt

SEQ ID NO: 3564 - DNA, 72 bp, Homo sapiens
gcttagagacctcagagaaaatgtgacccacaacacgccatcccaacaagcaaacacccgtgcgccagcctg

SEQ ID NO: 3565 - DNA, 72 bp, Homo sapiens
cggcctctgggtctcacagcgtgtgtggtcggccccgcccccggctctgaatcggtgacccgtgctggcctc

SEQ ID NO: 3566 - DNA, 72 bp, Homo sapiens
gaggccagcctccctggagctccatggcttctcaccggcacctgtgtgaggacgacatcccgcctttgtccc

SEQ ID NO: 3567 - DNA, 72 bp, Homo sapiens
gactcaggtgctggaggccacagccacgcatggcacgtgacagccaaggagggccaggtctatttctggacc

SEQ ID NO: 3568 - DNA, 72 bp, Homo sapiens
atctcctttttaggaaggaggaaacagagagacctcgtaacttggcatggccacacagtgagtcacacagtt

SEQ ID NO: 3569 - DNA, 72 bp, Homo sapiens
gggctcaggcctgtgatcccaccactttgggatgccgaggtagaaggattgcttcagtgcaagagttaagac

SEQ ID NO: 3570 - DNA, 72 bp, Homo sapiens
gtcacctccttaacatttattgagcaatttctagacgccaaatgctcctctgtgggcttcacagacttacga

SEQ ID NO: 3571 - DNA, 72 bp, Homo sapiens
cgtcactgggtggatcacgtcgcatcgcaggaccacgctctccccagctcttgccgtcacaaactcgggctc

SEQ ID NO: 3572 - DNA, 72 bp, Homo sapiens
atatattattacaaaacaaatgatgaaatatgagacgtgttcaactggttgtttgggcaacatgacatccac

SEQ ID NO: 3573 - DNA, 72 bp, Homo sapiens
cccaggaaatgcacgtggcatgcctatcagaagaacggcctcctcactcccatccctctatttccaaacagt

SEQ ID NO: 3574 - DNA, 72 bp, Homo sapiens
cagacagcatgaatgcagtgactcctgcattacaacgtactgtttcccaaggatgtgaatcgtccattttct

SEQ ID NO: 3575 - DNA, 72 bp, Homo sapiens
gatcatgtaaacttgctgtttttgttttttcctgccgggtgttgtatgtgtggtgacttgcggatttatgtt

SEQ ID NO: 3576 - DNA, 72 bp, Homo sapiens
gcgtcattagcaaagagggaatcccgggcagggggcggggagagagaggaactaatgataattttaaatttt

SEQ ID NO: 3577 - DNA, 72 bp, Homo sapiens
ggcatgatcctgattctcatcttcgccgaggtgctcggcctctacggtctcatcgtcgccctcatcctctcc

SEQ ID NO: 3578 - DNA, 72 bp, Homo sapiens
atgcagaaagacccacttctgtgaccccgcacactcggcactcatgactaatgtccctagggaaagagggag

SEQ ID NO: 3579 - DNA, 72 bp, Homo sapiens
atcacgcagaaagtgccagtcctcctgatgtgccccgagtgcttttctctttctccacagcgagcgtcagat

SEQ ID NO: 3580 - DNA, 72 bp, Homo sapiens
tttttgcaaaaccaatgcaatcactcttggggtctcgggggcaatgggatcacgtcaggctcaggcgctccc

SEQ ID NO: 3581 - DNA, 72 bp, Homo sapiens
gagaaacgccctgaatctcccgtccgctagcccttcggtttatcttcactgactccctgggtggaggccagc

SEQ ID NO: 3582 - DNA, 72 bp, Homo sapiens
tcatgtacaatcacattgtgaaacttgggaaacaacgcttccttccttcaaagtcagttctgctattcatgt

SEQ ID NO: 3583 - DNA, 72 bp, Homo sapiens
taacccttctcttcctcattttctcatctgtgagacgaagacagcctcccacccagacacactcccctcacg

SEQ ID NO: 3584 - DNA, 72 bp, Homo sapiens
acactttgcatttcctacattccttttccctgctccgaccccttccgcccggcctcagagctgacagctggg

SEQ ID NO: 3585 - DNA, 72 bp, Homo sapiens
ccccttccctaaattaaccactcctcctttgcctgcgaaaccagttgggactagaactaaaagggttaatta

SEQ ID NO: 3586 - DNA, 72 bp, Homo sapiens
ggcagagaatttaccccaggtgcgtggcccagtggcggaggcttgtgggaaattcctggtacccagctgccc

SEQ ID NO: 3587 - DNA, 72 bp, Homo sapiens
taatgtgactcctttaacctggtgtgctttaacaacgatccttaaagcttcctgttttaggcaacagccatt

SEQ ID NO: 3588 - DNA, 72 bp, Homo sapiens
tacacacagatccccgtgtgcatacaccgtaccatcgcagtgtattcagatcttgtctatacacacatctct

SEQ ID NO: 3589 - DNA, 72 bp, Homo sapiens
aaggcagatggcttgaagatccaatttggagattacatccataggacttgctgatgatcacatgtggcagag

SEQ ID NO: 3590 - DNA, 72 bp, Homo sapiens
ttgatttatagtaattcttgaagttgggttgtatccgtcctctgacttatttgttcaatattgtgttggctc

SEQ ID NO: 3591 - DNA, 72 bp, Homo sapiens
gggctactgtgtgggcagaacatgggtgccggtgacggcagtggtggcggtggagaggcggagaggagggaa

SEQ ID NO: 3592 - DNA, 72 bp, Homo sapiens
gcaatgtctccatggagcgggtgcctggctgtggtcgcttaggcaggagcttcctcctcagtgctgacaaca

SEQ ID NO: 3593 - DNA, 72 bp, Homo sapiens
ggtcctttgtgccctctgggcggtcgagcacccaacggtccacctccaccagggcagccacctgaatttact

SEQ ID NO: 3594 - DNA, 72 bp, Homo sapiens
agacaggaaatggctgtgttagtgcttcggacctccgttagaagtagcagttcatggtgttgaaggtttgtt

SEQ ID NO: 3595 - DNA, 72 bp, Homo sapiens
tcgaaattacgcgggcatgagtcagcgcatccctacgcgccctccgccccttgagggtgggtcgcttatagg

SEQ ID NO: 3596 - DNA, 72 bp, Homo sapiens
agctgggggggcctcacctgttcccctgaggaccccgccggacccggaggctcacagggaacaagacacggc

SEQ ID NO: 3597 - DNA, 72 bp, Homo sapiens
cataacactggaattaaagttggttgaaagaaaaccgtcaggtgactcatagtgaggtggcacagacatggc

SEQ ID NO: 3598 - DNA, 72 bp, Homo sapiens
ctccctcctccctgtctccaaagcggcaccgccctcgtgcgggttttctaaccgggcagagtcctggaagct

SEQ ID NO: 3599 - DNA, 72 bp, Homo sapiens
aatttaaatttttctgctacattgtctgctcagctcgtattctggtcatagaggaacctgaagccagagaaa

SEQ ID NO: 3600 - DNA, 72 bp, Homo sapiens
caggctgctgtgtagcagcagagaagcggaggagtcggtcagcaggctcttgtattaatcttggcaagccac

SEQ ID NO: 3601 - DNA, 72 bp, Homo sapiens
tgaactgagctaagcaaagcagcaggcatccctagcgcaggaaggaaaagccacagggtggaggggggtggg

SEQ ID NO: 3602 - DNA, 72 bp, Homo sapiens
ggaaggagaccagtggggaaaggcctgtccggaaacggggccttgaaggccacagacaggagcccgggacct

SEQ ID NO: 3603 - DNA, 72 bp, Homo sapiens
tcagtgtcactgtccgtcatgggtgtgtgagcccacggctgaatcatcacaaggtttcacacccgcacttca

SEQ ID NO: 3604 - DNA, 72 bp, Homo sapiens
cagttctagtgagcagaatgtcatgtgttctctctcggcactttgcaaactatcgcgagtcatgctacagtt

SEQ ID NO: 3605 - DNA, 72 bp, Homo sapiens
agtgtggagaaagcctaaacgtggtttgggtggtgcgggggttgggcgggggtgacttttgggggataaggg

SEQ ID NO: 3606 - DNA, 72 bp, Homo sapiens
aaaaattggaaccttcgtaatagcatctaatttgacgggggttgtcgatgtgagagctaaatatgcccgcat

SEQ ID NO: 3607 - DNA, 72 bp, Homo sapiens
agaagtcccagcgggactagcgcagaggccctgtccgtgtccctcactgctcactgcagtgcttggccccca

SEQ ID NO: 3608 - DNA, 72 bp, Homo sapiens
actttcagtcatgtgacctcctctgctcctttgtccggcacccattaccatggggaacagcgtcaggcttcg

SEQ ID NO: 3609 - DNA, 72 bp, Homo sapiens
tctaaacgtgcctagggcttaacgcagaggggagccgggagtccttcaagaagccacgaaggcttcaccctg

SEQ ID NO: 3610 - DNA, 72 bp, Homo sapiens
tcaagggccaggtctataaaaatgatgacatttcccgtaaaagggcctgcctggccctgcaccatttgcctt

SEQ ID NO: 3611 - DNA, 72 bp, Homo sapiens
gacctgggtgctgtgggtggcgcctgcctggaggacgaggccagcgccctgcgcctggatgaggacagcgag

SEQ ID NO: 3612 - DNA, 72 bp, Homo sapiens
aaggactcggggactctgctgcagtcatcctagcacggtcgagaggagtaggaaggtgcccagcggctcagc

SEQ ID NO: 3613 - DNA, 72 bp, Homo sapiens
gcaattgcacggtgcaacagttcacaaaaggaagtcgtggattctctctgattggaggttttttgaaaaaac

SEQ ID NO: 3614 - DNA, 72 bp, Homo sapiens
gtacaaagtacatgtgctgtgcttcagtttgcatccgcctggtctgttacacatattatctggaaaatactg

SEQ ID NO: 3615 - DNA, 72 bp, Homo sapiens
ctgtgaggttcctggggcggagatgtgcagtggagcgagaacttcctgtgaccgtgacattgtctaggtggt

SEQ ID NO: 3616 - DNA, 72 bp, Homo sapiens
ttgggtaattaagcacctacccatgtccaaggccacgtagaggctttatagaattaaaatacctgctctcaa

SEQ ID NO: 3617 - DNA, 72 bp, Homo sapiens
gatgttgatgttgatgatgtccctgccaggataaccggtccagattggccagctgtgagaataattcaagtg

SEQ ID NO: 3618 - DNA, 72 bp, Homo sapiens
gctgtgggtggcccgtgtacaggaatgggatcgcacggtggtccagatcgtctgtgcacccatccttgccct

SEQ ID NO: 3619 - DNA, 72 bp, Homo sapiens
aatcagaggaaacagcatggagtaagttctaagttcggggcccacaccatatcaaatttaggcctggggaag

SEQ ID NO: 3620 - DNA, 72 bp, Homo sapiens
ggccctttgtccgccagggcttggcagccgcccagcgaaggcctttgtccccaaccccgagtgattgagact

SEQ ID NO: 3621 - DNA, 72 bp, Homo sapiens
agggaaggggaggatccagcctcattccagccccacgtcccccccaacacacacagtgggggctgcttccca

SEQ ID NO: 3622 - DNA, 72 bp, Homo sapiens
gtgccgggataaaaagcaccagcggacactgatgccggagaagctgtcacacaagctgctggaggctttcca

SEQ ID NO: 3623 - DNA, 72 bp, Homo sapiens
gcagatggagctcagtgttatgtgttttggatgctcgcaataagattttcatgcaccataaactttcctgag

SEQ ID NO: 3624 - DNA, 72 bp, Homo sapiens
ggagctgtgggctcagttaagctgttctccctcagcgtgtctctcaggtgcagtcaggcggagcggcctggg

SEQ ID NO: 3625 - DNA, 72 bp, Homo sapiens
agacggcatcagcctttgagggtgctgcagttacacggctccagcagtctgagccttatcaagacctttcca

SEQ ID NO: 3626 - DNA, 72 bp, Homo sapiens
gctgtagagtattccaaggtctctgctagctctaacgtcacagatatgtgtatctagatgtttctagtttgt

SEQ ID NO: 3627 - DNA, 72 bp, Homo sapiens
cagggggctggaggcaggtaaaaagcaggctcttgcgtggcccggacagttgatattcctggcactcggtgt

SEQ ID NO: 3628 - DNA, 72 bp, Homo sapiens
gctcccatgccctggtgtggcatgctctgttttgccgtgactgcggctacatggcttggcctgttgggtggc

SEQ ID NO: 3629 - DNA, 72 bp, Homo sapiens
attgtgggattcaatgaggtaatacatagatgaagcgccgcctggcacagggtacgcactcaataaatgtgt

SEQ ID NO: 3630 - DNA, 72 bp, Homo sapiens
tgcatcttcagaattctcctttgttgattagccctcgagactgaccatagcaagctcagtggtctggtgaaa

SEQ ID NO: 3631 - DNA, 72 bp, Homo sapiens
tcccgggttgcttaatagaatctgctgggaaggggcgaggggctgagaaggaagaggaaggaggagggaaga

SEQ ID NO: 3632 - DNA, 72 bp, Homo sapiens
ttgagaatagatttcaggggagcaaaggtagaatacgagtgacctattaggaggtaatggcacaatataggc

SEQ ID NO: 3633 - DNA, 72 bp, Homo sapiens
ctgtgcacacttgtataaaacaactataagacacacgagagatctggaagccagttcctcataagtaagaat

SEQ ID NO: 3634 - DNA, 72 bp, Homo sapiens
ccgatttagaaggctggcggcgttccagggggtttcggcgttccgggcgcgcggcggggtgggggcagggac

SEQ ID NO: 3635 - DNA, 72 bp, Homo sapiens
ttgaagcacatttttacacttttaatccactggaacgtcactgagaaaatgttctgagagtcataagaatgt

SEQ ID NO: 3636 - DNA, 72 bp, Homo sapiens
ccctctcctagaccagcctatatagaaacagcccacgcagcagctaatccaggggccagggctgttgaaagc

SEQ ID NO: 3637 - DNA, 72 bp, Homo sapiens
acaattttgtctgcactgcagcctgtagtgcagagcgagaccctgtccccatcccccaccaaaaaataataa

SEQ ID NO: 3638 - DNA, 72 bp, Homo sapiens
ctctcgggcattagacatcaagctgtgaggaagtacgtgaaatcacagcattgaattctcttgctgggagga

SEQ ID NO: 3639 - DNA, 72 bp, Homo sapiens
cagtttttaaactctgacttggcaggtagactcctcgtgcatctatctgtttatttatattgaggtttgtta

SEQ ID NO: 3640 - DNA, 72 bp, Homo sapiens
ctggagctacagagggccatgctggcctggaatagcggccactgatccaggataacatctttggcctgggat

SEQ ID NO: 3641 - DNA, 72 bp, Homo sapiens
ttcctgtctttatctgagattactcaactgtaaaacgtgttctgtgggccaactgtgacactgggagtgtgg

SEQ ID NO: 3642 - DNA, 72 bp, Homo sapiens
aaacggacttcctgaaatcccaagttgggatttcacgtccagtgacccacaagagaagcaagaagtctgaac

SEQ ID NO: 3643 - DNA, 72 bp, Homo sapiens
gcagttgtcacactgtgctcagttccccatgtggtcgtaggtctgatgcaacctttttcttgtctgtccttt

SEQ ID NO: 3644 - DNA, 72 bp, Homo sapiens
cgacccgtggtctagtggcacctgcgaagtgcgcccgggtcaggaagctgtgctgtggcccgggctgggctc

SEQ ID NO: 3645 - DNA, 72 bp, Homo sapiens
ggcagggtggagggtgagggaggacactcttcatgcggaattaagataataaactgcccagtggaggctgga

SEQ ID NO: 3646 - DNA, 72 bp, Homo sapiens
acagttcttgacagactcatagatgtaggagggtacgaggaatacacacagcacacaatggacagccaaacc

SEQ ID NO: 3647 - DNA, 72 bp, Homo sapiens
gacggccaggatggtaggtggggccccaagtgttccggtgttttgtcagtgtggctggggactcccagccgg

SEQ ID NO: 3648 - DNA, 72 bp, Homo sapiens
cccctctaagggctgaagttttccctgggcctgcccgggagatgggtggagtctcttctcaggccagctcca

SEQ ID NO: 3649 - DNA, 72 bp, Homo sapiens
ctccagccccggcttcctaggaagttgtgaccctacggccctctcgggactcagctgtcctttccatgtagg

SEQ ID NO: 3650 - DNA, 72 bp, Homo sapiens
gtttgtggactaggtatgtgtccagagctgccgctcgccccttctattttggacacctgagaccttgcacat

SEQ ID NO: 3651 - DNA, 72 bp, Homo sapiens
ggaggcaccagattagaatctacttcctcactgcccggtctgtcttccttggaaaaggaaaagggaagtaga

SEQ ID NO: 3652 - DNA, 72 bp, Homo sapiens
cttcgaactcacctagacccttgcatcaaaggactcggggactctgctgcagtcatcctagcacggtcgaga

SEQ ID NO: 3653 - DNA, 72 bp, Homo sapiens
gaggctggagctggtgggggccactaggaagcccacggcaatgcccttcatcccacttaccgcagctccaga

SEQ ID NO: 3654 - DNA, 72 bp, Homo sapiens
gggcttggggatttggtgctgccattgccctccctcgtaggtggccctaggggggtccctccgcctccgttt

SEQ ID NO: 3655 - DNA, 72 bp, Homo sapiens
aaacataacaacttctggtttcagtctcacaacttcgggcaaaatcattgcaaaaaactgcagctccccata

SEQ ID NO: 3656 - DNA, 72 bp, Homo sapiens
acacacccagggcgtggggtcccaggcttagggatcggcaggggtggctccccaaccaccaggaccccggca

SEQ ID NO: 3657 - DNA, 72 bp, Homo sapiens
tgagtccctactatgtcagctaataaaacccaccacgtgctatgcagcagattaaaaacgaggatgtactgg

SEQ ID NO: 3658 - DNA, 72 bp, Homo sapiens
tgcgagatggtggacacgggtcaggggcctctgcccgcggcacctcaactccctgtaccgggagcccgagcc

SEQ ID NO: 3659 - DNA, 72 bp, Homo sapiens
gtaaaaattgaagaagcagagttaaaagtagctagcggtctggcctaagagacaggaagtggcccagactga

SEQ ID NO: 3660 - DNA, 72 bp, Homo sapiens
gggggactgagcgatgctctaattcctttgtgaaacgtttgatctctgcggtgtggccacaggcttccgccg

SEQ ID NO: 3661 - DNA, 72 bp, Homo sapiens
aaactgagttaagtcagcagttcagcaagtgcttacgaaagacagtcaaaatataggcaagttactttaaat

SEQ ID NO: 3662 - DNA, 72 bp, Homo sapiens
tgcagccttgaatcttggacatactgccctacctccgccctctgcttagacccacagctgtgtgagctttga

SEQ ID NO: 3663 - DNA, 72 bp, Homo sapiens
caaaatccattctgcctgctgattttctgcacggccgggaaggagcactcctgggctttaagccaacggttt

SEQ ID NO: 3664 - DNA, 72 bp, Homo sapiens
cctggtgtgggagaggcaccctgtgctccctggcccgtgagacaagattgggtttgggggccagggcaggag

SEQ ID NO: 3665 - DNA, 72 bp, Homo sapiens
gatgtaggtcatgaggatggggtggctgtggctgacgggctgtcagagcccagcaggagttcccatccccca

SEQ ID NO: 3666 - DNA, 72 bp, Homo sapiens
tcaaacctaactgtgcatgataatcatctctgtaccgttttatttatttcgaaatacagaaatgtaggtcct

SEQ ID NO: 3667 - DNA, 72 bp, Homo sapiens
atctctactaaaatgtttagtaattaggccgggcacggtgactcacgcctgtaattccagcgctttaggagg

SEQ ID NO: 3668 - DNA, 72 bp, Homo sapiens
ttgtgggtgcatgcgcggcaggcctggggcctggccgcctgctgcctcacctgcaaggaggggcctcccaga

SEQ ID NO: 3669 - DNA, 72 bp, Homo sapiens
ccatccttccagcacactccctctcccctctagcccgcacacagaggctgggcttagccttggggaagatct

SEQ ID NO: 3670 - DNA, 72 bp, Homo sapiens
catagaggaggttccagccgcgcaggagctgacggcgcagggcaggctcaggcatggcgggctgcgcgtccc

SEQ ID NO: 3671 - DNA, 72 bp, Homo sapiens
ctgcaatggtggagtttttggattttccttcagtccgattgctaaaatacttccctctcatgtgagctgttg

SEQ ID NO: 3672 - DNA, 72 bp, Homo sapiens
gataagggggaagatgggaagaaacagacgggagacgcccgcccagaaagactgcgggaagaaagaaattcg

SEQ ID NO: 3673 - DNA, 72 bp, Homo sapiens
ctggggggtgctgggaacaccctgcaaacagcctccgatacggggagccggtggataccatccttttccagg

SEQ ID NO: 3674 - DNA, 72 bp, Homo sapiens
attgtcggcatgcaataataatagctgacgcctaccgagttctttctgtgccaaaggcgcctttaccatgag

SEQ ID NO: 3675 - DNA, 72 bp, Homo sapiens
aggtgaggtgtgggggaatgtgttttattctgatacggggcctctaaagccactgaattagaaagtcccaaa

SEQ ID NO: 3676 - DNA, 72 bp, Homo sapiens
ttcacggagccctgcacggcgggggcctggccggccgaggaagcgcaaacactcaagctcgctgcctgcccc

SEQ ID NO: 3677 - DNA, 72 bp, Homo sapiens
tgacaagccctgtggagcgtccctgcagaggactccggccagcctgactgacgcaatccaaagagcgctccc

SEQ ID NO: 3678 - DNA, 72 bp, Homo sapiens
catcacagtgcttgggccatagaaccaggcagctccgagctgaccgatcttcccgaaagcccgtgcccaggg

SEQ ID NO: 3679 - DNA, 72 bp, Homo sapiens
caatttcattcagtttcttggatctctctcacactcgatcctcactgtatccttcacagaaatccttctacc

SEQ ID NO: 3680 - DNA, 72 bp, Homo sapiens
aaaacaatcttacacaaaagtggaaacatctactccgtcagctcagtccactcttcttaataagagtcagaa

SEQ ID NO: 3681 - DNA, 72 bp, Homo sapiens
tcacggtcactccgtagaggctgggtgacatgaaccgatgaacttgcacagaacggaatgcagtgacagggc

SEQ ID NO: 3682 - DNA, 72 bp, Homo sapiens
tggcacagcaaccagaaggaattttaaaagatgcacgtaagatgatctcattccctttcttatctggtcagt

SEQ ID NO: 3683 - DNA, 72 bp, Homo sapiens
ccagatacccggtgtcagctggtgaaagaaggacgcgatgaagttgctgtctcccctcggagtttggcaggc

SEQ ID NO: 3684 - DNA, 72 bp, Homo sapiens
agcgggtcagcgggggcggggggagatgacagacacgttccagcagatcccaaagggtggcgggcatttgtc

SEQ ID NO: 3685 - DNA, 72 bp, Homo sapiens
ttcccctctggccttagttcttctgcctttgtgcacgttcacttacttgagatgacttagttgagtcatctc

SEQ ID NO: 3686 - DNA, 72 bp, Homo sapiens
ccgggccccaccgtctgctttttctgcctatgaaccggcccactctggggacctcgtgtgtggggagtcaca

SEQ ID NO: 3687 - DNA, 72 bp, Homo sapiens
ccaccatggcctgccaaggtgtaagatgtatgcggcgataacagagtcacacacaggactttctaatccatc

SEQ ID NO: 3688 - DNA, 72 bp, Homo sapiens
cacagtaggccccgggcacattttcagctgcgaagcggaggactagcaaccggtgaggtagaaggagaacca

SEQ ID NO: 3689 - DNA, 72 bp, Homo sapiens
aggagaggaagaaagaaggaaaagggaaatagtaacggcacaaattagaaactgcaatgagcaaacagcaat

SEQ ID NO: 3690 - DNA, 72 bp, Homo sapiens
ctgcacgatctctttgtctggcttcagcaagttggcgattttgcgcaaggccacattgacgtctgcggtggg

SEQ ID NO: 3691 - DNA, 72 bp, Homo sapiens
gctctgcttgtgactgcggaacctgctgggtgctccgcggggctgccctgcactgtcctccaagggccgcta

SEQ ID NO: 3692 - DNA, 72 bp, Homo sapiens
ttgcaaacatttgcagaactgctcagtcagccttccgggaaaaccatgcccacatcctactggattcctcta

SEQ ID NO: 3693 - DNA, 72 bp, Homo sapiens
tttcccctttataaagtggcagtggcaatctgtggcggcatgctacagacacaagttcatggtaagttcaga

SEQ ID NO: 3694 - DNA, 72 bp, Homo sapiens
agtgtgacttgacaccacgatgcacgttcatgtggcggttgaggttgctgctgtggttgaactgcttgccac

SEQ ID NO: 3695 - DNA, 72 bp, Homo sapiens
gggaagggctggtcctttttggccatcctgacctacggattaagtgcatgtcgaaattttaacaagtggcgg

SEQ ID NO: 3696 - DNA, 72 bp, Homo sapiens
ataccttggagctgatagtgtgcatctccagctcccggctgcccccggccccgccgcctggtgctgccgtcg

SEQ ID NO: 3697 - DNA, 72 bp, Homo sapiens
atgcaaacatgaaaggaggcatggccatagacccccggtgagaattctttactgtgatgacacagaagctga

SEQ ID NO: 3698 - DNA, 72 bp, Homo sapiens
ttgattcaggtaatcactcccctcctttgacttttcgggcctgggggtggaaacattgatttgctactggcc

SEQ ID NO: 3699 - DNA, 72 bp, Homo sapiens
agttagcggcctccggtgtgggaaggccacggagccgggccggagacatggcccgggggcccggccagctag

SEQ ID NO: 3700 - DNA, 72 bp, Homo sapiens
gcacacagcagggagaaaagccaaccaaagaagaccgaagggtatctttccacccgagtagcctctgtagtg

SEQ ID NO: 3701 - DNA, 72 bp, Homo sapiens
gccccccctactgggaagtgaggagcccctctgcccggccaccaccccgtctgggaggtgagcccaaccgct

SEQ ID NO: 3702 - DNA, 72 bp, Homo sapiens
tgccatctgtctgaggctctgacagacagcaataacgtcactggattgtgcaaccatattccctgttgatga

SEQ ID NO: 3703 - DNA, 72 bp, Homo sapiens
ctgacgcccgcgcgcctcagccaggcccgcttcagcgcctgcctgccgcccagcagccacgacgcggccaac

SEQ ID NO: 3704 - DNA, 72 bp, Homo sapiens
tcaattcctgtaactgaaatcaggaatccattgctcgccatctccctgctctgcttcctctaggctggcttc

SEQ ID NO: 3705 - DNA, 72 bp, Homo sapiens
gagggttatggtagctgggtcacctgggaacaggccgtgggagaactggcctccttgggaatgtgttgtcct

SEQ ID NO: 3706 - DNA, 72 bp, Homo sapiens
gaggtgccagtggttccctgggcacggggcagaatcggaggaggacatcctctttctgaggttaaggaggta

SEQ ID NO: 3707 - DNA, 72 bp, Homo sapiens
ctgggattataggcacgagccactgcccccagctgcgatacagaatattttcatcatcacagaatgttttat

SEQ ID NO: 3708 - DNA, 72 bp, Homo sapiens
atcatggtgctctcctgcacagagacatcgggaaacggctcgaggtgcggaagaccgtgaccgcgtgcctgg

SEQ ID NO: 3709 - DNA, 72 bp, Homo sapiens
gcccagtaagccagggctgcgggggagacggagggcggggcccggacacgggcttttcccagcggccagcac

SEQ ID NO: 3710 - DNA, 72 bp, Homo sapiens
ggtttgtaggagaggcctcctggagttggtcagaccgctgagaaagggccactgccccactggtggggtgcc

SEQ ID NO: 3711 - DNA, 72 bp, Homo sapiens
atacttacatattgaaaggctcctggggacaccaccgtcactccttttaatccacgtgacaattttagttct

SEQ ID NO: 3712 - DNA, 72 bp, Homo sapiens
ttcaaatattacttctgcaatttttctaagagtaacgggaaatagatcttgcatcctacagtatactgggtg

SEQ ID NO: 3713 - DNA, 72 bp, Homo sapiens
tctagtttttttttcctcttagaaaataatacttgcgatgactttccttgtagctcagactttttcacgtct

SEQ ID NO: 3714 - DNA, 72 bp, Homo sapiens
tcctttcctgccacatcgccttttatgcaacttgacgagtgggaagatactggcattccaagctctggcagg

SEQ ID NO: 3715 - DNA, 72 bp, Homo sapiens
aggaatgcctgggtggaggagtggtcagggctggccgggtcgggggtgtggccgcggcctgctgggttggtt

SEQ ID NO: 3716 - DNA, 72 bp, Homo sapiens
gaatagtgccttccataaaatctgtgggagttttccgtttatgttgcttgtttttaaacaatcttcttggaa

SEQ ID NO: 3717 - DNA, 72 bp, Homo sapiens
ggtcctgcctagcacctctccctgccccaccccagcgtccccagacagactggtagggacttctccctggtg

SEQ ID NO: 3718 - DNA, 72 bp, Homo sapiens
tcgttgagttcctgccatgcaccaaatcacaaacacgtcaggcagtaggcattctttagtttacccgggagg

SEQ ID NO: 3719 - DNA, 72 bp, Homo sapiens
cggcctcacccaaaagaaagaggagaggctgttcgcgcgaggctgttcatcgtggcacgtctgtgacaggaa

SEQ ID NO: 3720 - DNA, 72 bp, Homo sapiens
gagaccaaggtcacacagagagcaaggggtagagccgggtctgactccatccacagccaggacgctttaact

SEQ ID NO: 3721 - DNA, 72 bp, Homo sapiens
gacagaaacaaagggaaggagagaagccaggcagacggaggagagcagagaagttcttggtgcaccctgagg

SEQ ID NO: 3722 - DNA, 72 bp, Homo sapiens
ctcgtcactctgtgagctgctggaggacaggagcccgctctcctgcattcctggattcttggcacagggcac

SEQ ID NO: 3723 - DNA, 72 bp, Homo sapiens
catcaatccacagctgctcaggtctctccacactccggctcactatagccctgccctgggcagcagggctgg

SEQ ID NO: 3724 - DNA, 72 bp, Homo sapiens
tcctggagcggggtcacagtgagcattcggtcagccggggagacagacgccacaaagctcagcaggggctca

SEQ ID NO: 3725 - DNA, 72 bp, Homo sapiens
gcgagtgcccaggtgacttcgggcctcagtcctctcgccagcaaagggcggacaatgacccctcccgtcccg

SEQ ID NO: 3726 - DNA, 72 bp, Homo sapiens
gttgtgtaaagctgagaactgcacccaagcttccccgttcaccccacctaccaggggatttgggctaaattc

SEQ ID NO: 3727 - DNA, 72 bp, Homo sapiens
cacagcggcctctcctccaacttcaatgaatggtacgtgtgacgggtcggggcctctctccctctccctgtc

SEQ ID NO: 3728 - DNA, 72 bp, Homo sapiens
caagtgtattgcatcagggttgaacagggtggcgccggccaaagagggattcctttcaggcccgggcctcgc

SEQ ID NO: 3729 - DNA, 72 bp, Homo sapiens
cgaacggggcgaggctgtgaggacgggttttggagcgccgctcggccgtcctcaaaactttggacacaccct

SEQ ID NO: 3730 - DNA, 72 bp, Homo sapiens
tgtggtttcctcaagctcgtgctgataggcccaggcggtatacaggcggaagcacttccctgcagccacccg

SEQ ID NO: 3731 - DNA, 72 bp, Homo sapiens
ggctggctggggaccgagtggctcagggataaatgcgcagcctgagagggggtgagctgacactgtcccagc

SEQ ID NO: 3732 - DNA, 72 bp, Homo sapiens
ccgctgccgggaaggcgggtctgtccagtagagaccggaacgccgcgcaggctcagcaaagggctaaggctg

SEQ ID NO: 3733 - DNA, 72 bp, Homo sapiens
aaaacagtcattgatatcaagccaacaaatgggtgcggttgtgttgcaataaaactctatttaggccaggtt

SEQ ID NO: 3734 - DNA, 72 bp, Homo sapiens
tgacaccatcatccaccatcagccactgctggaaacgtatgagccaaccccagttctccctccaggcccacc

SEQ ID NO: 3735 - DNA, 72 bp, Homo sapiens
tcctatttctgaaagtctcacttgtaatgcatcctcggatgtcagtagtgtgctcattgtttgtcaaaaggt

SEQ ID NO: 3736 - DNA, 72 bp, Homo sapiens
caaggggaatggttactgaggctggagaagggaggcgagtcttagtgagttccctttaagctctgagacaac

SEQ ID NO: 3737 - DNA, 72 bp, Homo sapiens
taacaccctgcagggtgtattcagccaacacttagcgcctacaatatgccaggcgctaagggttttaccacc

SEQ ID NO: 3738 - DNA, 72 bp, Homo sapiens
cctgacatccgattgtgaaagatgtcacccagaggcgggcagaggggctgtcttttccttttctcgttgctg

SEQ ID NO: 3739 - DNA, 72 bp, Homo sapiens
cgaaggaagttgcacgccaaatgcaaaacctccagcgagctggatttctttgcactttttttttattattat

SEQ ID NO: 3740 - DNA, 72 bp, Homo sapiens
ggagctttggggggcgccttctcacggtgccaacccgccagccccgccctttgccatctctgaaagcgctac

SEQ ID NO: 3741 - DNA, 72 bp, Homo sapiens
ccctgaggcggatgacacttgtgtgatcctgtaaccgatttcttgttagaatgttggcatctttcacccagt

SEQ ID NO: 3742 - DNA, 72 bp, Homo sapiens
ggtctctagcaatttcttcaggtcatccctgtagacggcatggaaattcccctttatcagggagtacttgtg

SEQ ID NO: 3743 - DNA, 72 bp, Homo sapiens
cccctcggtcagtctgacaagccttctggagccgacgccctgcagtccagtgggaagcactctctggggcta

SEQ ID NO: 3744 - DNA, 72 bp, Homo sapiens
gtcatcagtgtcctagctttattacacccccagcacgcacacaagaaatgtaacttaactgattatcctcac

SEQ ID NO: 3745 - DNA, 72 bp, Homo sapiens
cagaaatgaacaaataaacacacaagatcatttcccgtggtagtgagagctgggatgaaaataaaacagcgt

SEQ ID NO: 3746 - DNA, 72 bp, Homo sapiens
gtgtttgagtattaagcaattctaagcaactaggtcgggaagtatgaagagggatttaggtaagttcagcca

SEQ ID NO: 3747 - DNA, 72 bp, Homo sapiens
ggctttcctgttgcgaaaggctcggttcccttcagcgtgttctgccatcacaagcagtctgcaagctggaaa

SEQ ID NO: 3748 - DNA, 72 bp, Homo sapiens
cttcttccctctcagctctgatttctcctctcccccgtggggctgcattttcatggagtacctatctccagg

SEQ ID NO: 3749 - DNA, 72 bp, Homo sapiens
gacgggtgggggaggagatggggatgaaagggaagcgtttgcagcttgtggagcactgggaagagcagggac

SEQ ID NO: 3750 - DNA, 72 bp, Homo sapiens
tttaacattatattgactccttttgctgttcctctcgaagaaaatgtcttccttggaaaagtgtggtgtcta

SEQ ID NO: 3751 - DNA, 72 bp, Homo sapiens
tagtcaagttgttagaaggtgctccattgccttatcgcatggccctgcatttacatttagcagtgagctggt

SEQ ID NO: 3752 - DNA, 72 bp, Homo sapiens
gtctgagaagaagaatgctttaatggtaataacaacggggaaggggacaatctagtatttgatgtaaaccac

SEQ ID NO: 3753 - DNA, 72 bp, Homo sapiens
gcaccaacctgctagatctgcacacagtttacattcgcagaaacagtagccacttcccttatagggttctgt

SEQ ID NO: 3754 - DNA, 72 bp, Homo sapiens
caggcacacgccattacatcatcctgttttgctagcgccaaggccctatcactacgatctggttcactcatt

SEQ ID NO: 3755 - DNA, 72 bp, Homo sapiens
ttgccagctcctgcgacggaggctgccaggcgggacgggctgggcacggcacgaggcggcaacaataggcac

SEQ ID NO: 3756 - DNA, 72 bp, Homo sapiens
agaacacaacttacactcgggcactcacggacagtcgtgattgcaaaacgggaagtgatctgaagagtcgca

SEQ ID NO: 3757 - DNA, 72 bp, Homo sapiens
gtctagaagagtcaacttgtggtttcacatctggccgggctgaccagatgttgcaaggatacagaaagtgga

SEQ ID NO: 3758 - DNA, 72 bp, Homo sapiens
ggtcttatggaaggaaggggtctagggaacagaaccgtaaagaagcgacgtcacttcctggatgatgaccac

SEQ ID NO: 3759 - DNA, 72 bp, Homo sapiens
acctgatctaagtccctgataccacagatgaagcccggagaggagaagtgaattccccagagtcacagagct

SEQ ID NO: 3760 - DNA, 72 bp, Homo sapiens
ttactcatctgcagagtgagaataacttggagttacggagattacatacaatgatgtgcgcaatatttagca

SEQ ID NO: 3761 - DNA, 72 bp, Homo sapiens
agttcgagaccagcctgggcaacaaagtgagaccccgtctctacaaaaagttgaaaaattagtcaggagtgg

SEQ ID NO: 3762 - DNA, 72 bp, Homo sapiens
gctggaagagcaagcaccacgcgggggggtaggggcgccccagccctctactggccagtgtccctccagtcg

SEQ ID NO: 3763 - DNA, 72 bp, Homo sapiens
aattcacttgtccctgagggagatggtggacccagcggtaatgaatggtttatgtcccaatctgacgtatgt

SEQ ID NO: 3764 - DNA, 72 bp, Homo sapiens
gggcagcccggctcccccagattgcctcccgtccccggcaggccccacacaccgagcaaacagcgctgggca

SEQ ID NO: 3765 - DNA, 72 bp, Homo sapiens
cttcctttctgggtccagtccagattccagggcgtcggggctgcaaccccacaaagggcgaagtacctggaa

SEQ ID NO: 3766 - DNA, 72 bp, Homo sapiens
tttctcttcctctttagttattgctgctaacagcacggctagttgagaaactggaccaaagcccataaccaa

SEQ ID NO: 3767 - DNA, 72 bp, Homo sapiens
ttgtgggggcagagagggaagagtgtaatagagcccgtgatggtagaggatgaaccacaactctcaactctt

SEQ ID NO: 3768 - DNA, 72 bp, Homo sapiens
actgttattgcctgtaaccaaatgtatcacagtatcgtctaccaaggcgttacatcctgaaactttcctaca

SEQ ID NO: 3769 - DNA, 72 bp, Homo sapiens
tgtgcatacacagggacccgtgacacattgtgtctcgcatcacttttggtcaaaacatcatctgtcacctcc

SEQ ID NO: 3770 - DNA, 72 bp, Homo sapiens
tcaccagggctgggcctgaatgagggcccaggtcccgaggatggtgaccagagaatgcaaagtgtgggggcc

SEQ ID NO: 3771 - DNA, 72 bp, Homo sapiens
ctatttggtatttccagcaaaacctagcccactctcgccacctgcatgccagcgctgtcctggatgtgggca

SEQ ID NO: 3772 - DNA, 72 bp, Homo sapiens
ggcgagtttgcatccgcgtctaataaagaaactaccgtttctcacgcaggcacgttctgaacgcccgagtgc

SEQ ID NO: 3773 - DNA, 72 bp, Homo sapiens
cataatttatgtaactaattgccttgtgagggacacgtgggtggcttctaattctttgctattgtggactgt

SEQ ID NO: 3774 - DNA, 72 bp, Homo sapiens
ggctgggctggtcctgctgctgctctgacagctcccgctccacccccacccaccactgtagcccttgcgaaa

SEQ ID NO: 3775 - DNA, 72 bp, Homo sapiens
ctgaagactgaaggaatagacatgtgccagccagacgaacacattgcatgtatttgtatcaggcatctttcc

SEQ ID NO: 3776 - DNA, 72 bp, Homo sapiens
agcggctgcggaaggtgtgctgggtcccccagcagcgccggcccactggcgctgcgctcaatcgatttctcg

SEQ ID NO: 3777 - DNA, 72 bp, Homo sapiens
cttctacaactcagatgttgccttaccatattctacgtaatgcacaactacacgaaagataaatctgtgttt

SEQ ID NO: 3778 - DNA, 72 bp, Homo sapiens
gaatctcattggccccagggctgtgcccctggactcgctctcgggaagccaagccaggtccaactgataacc

SEQ ID NO: 3779 - DNA, 72 bp, Homo sapiens
tggcgggctttggccttgggcgcggcccgcagatgcgtgcagcatgcggggctgtggagcgcttattggttt

SEQ ID NO: 3780 - DNA, 72 bp, Homo sapiens
cagaaagctggggctcaaatcaaagcaaagagcaacgattgacttcaccctcttgaattttgatgcagtggg

SEQ ID NO: 3781 - DNA, 72 bp, Homo sapiens
ctcctgagcactcacccttgatggccccagctcctcggagactcagcaggaaagccaaggagagggctctca

SEQ ID NO: 3782 - DNA, 72 bp, Homo sapiens
tcctgaggaaaccaggccggaggggcgggctgccacgaggcacctccctgagagggagggggtggctggaaa

SEQ ID NO: 3783 - DNA, 72 bp, Homo sapiens
aggccgattgcaccaggcttccatatgaacgagcccggctcccttgaagcagtcctgacccccctggcgggg

SEQ ID NO: 3784 - DNA, 72 bp, Homo sapiens
aggagagatcaggaaggaagatgactcaggggaagcgatgcctgaatcttgaaagatggcaatgtgaaaatc

SEQ ID NO: 3785 - DNA, 72 bp, Homo sapiens
tcaccaagctttgatgccccaaccctgagtcaagccgtcccgttgacccccctcaacttcctggcctcactg

SEQ ID NO: 3786 - DNA, 72 bp, Homo sapiens
ttcacaactcttggcaaaaacagtgctgtaaaaatcgtaagtttatttgttaaaaaaaatactgtatttgaa

SEQ ID NO: 3787 - DNA, 72 bp, Homo sapiens
acaacttttggcatggttttttctttacttcaagtcgtttctggagaaagtggctatgctcaaaatggtgag

SEQ ID NO: 3788 - DNA, 72 bp, Homo sapiens
ggaatgtggtcaatctggtgttcctctttctaaaccggaggggggccccaattgtaagccaaatttactgtt

SEQ ID NO: 3789 - DNA, 72 bp, Homo sapiens
gctggaagtagtgccctggcaacacacaaaaggaacggtgaaatggtaggcaaagtgaacttggctctgctg

SEQ ID NO: 3790 - DNA, 72 bp, Homo sapiens
tcctagttaggaaatcctattcatttctattaccccggctttaagggaatctcagacccagagaggttgaga

SEQ ID NO: 3791 - DNA, 72 bp, Homo sapiens
taaaggggtcacgaagttctgggaggttaagggaacgaggaaggagattgagcaacaaggaaagagcttgcc

SEQ ID NO: 3792 - DNA, 72 bp, Homo sapiens
catatttttaacatgactaatgttacctagaaccacgtatcctccttctgttgaaaagtaagttcctgtttc

SEQ ID NO: 3793 - DNA, 72 bp, Homo sapiens
cccacccacatcccccttccccacctgccttgccacgtctgtggatctttagagtagtttcatgcatatgaa

SEQ ID NO: 3794 - DNA, 72 bp, Homo sapiens
cagctcaggccctctattctttccatgctggtctgcggcctccgttacccacctgctgagggcgatcttctg

SEQ ID NO: 3795 - DNA, 72 bp, Homo sapiens
aaggggaagcaaggcattgcaggcagaaggaaacacgtatgtgaagatcctgaggcaacaggaaatttgatg

SEQ ID NO: 3796 - DNA, 72 bp, Homo sapiens
accgagcatacccgccctgcatgtcgcacactccacgtgcggctatgaaaagaagtggaggctcagagtggt

SEQ ID NO: 3797 - DNA, 72 bp, Homo sapiens
gctgcacatgtggagccaaatggtggcgacgtcgtcggtggacgttcccagtcagctatttcttctacaact

SEQ ID NO: 3798 - DNA, 72 bp, Homo sapiens
aacttttttttttgaggaacttttctcttgcaacacgtgggctcaccatatgttcagggtgccctgatgttc

SEQ ID NO: 3799 - DNA, 72 bp, Homo sapiens
ctctgtgatgttcatgcaatgatgaaattgcctaacgacaacgtgtctccctctttaaatcaagcatgactg

SEQ ID NO: 3800 - DNA, 72 bp, Homo sapiens
tgccaactatcttttgacattcccagaggcaggagcgtgcatccttgaaggtgcttctcctcgagggtgggc

SEQ ID NO: 3801 - DNA, 72 bp, Homo sapiens
gggttcaaatcccagctcagccatatctatgaaagcgtgacttgcagataggtgaccacaaacaccacagcc

SEQ ID NO: 3802 - DNA, 72 bp, Homo sapiens
gggatgggatggtcagagaccccgtggggccaattcgtttacctcttgacatcagtagctacaccagagaag

SEQ ID NO: 3803 - DNA, 72 bp, Homo sapiens
ccactggcccccacgctggggagctcccactgcagcgccactccggcgccccctcctggccgtgtcagcagc

SEQ ID NO: 3804 - DNA, 72 bp, Homo sapiens
ccaccgcagagatgcacatacttctatcttgcctccggccccgtggacccggctgctctgcctggtcagctt

SEQ ID NO: 3805 - DNA, 72 bp, Homo sapiens
atgggcagggccaggctgtgtgggtggtgggctgccggcagctgacagccacctgctcagctctgagaaggg

SEQ ID NO: 3806 - DNA, 72 bp, Homo sapiens
tgctgcttctcatgtgcttcatgcccgagaccccgcgcttcctgctgactcagcacaggcgccaggaggcca

SEQ ID NO: 3807 - DNA, 72 bp, Homo sapiens
cctcagggcccacaatctcaacagtgtcctaacctcggtaagagtctctagcaagaggtgcagcctgcaaga

SEQ ID NO: 3808 - DNA, 72 bp, Homo sapiens
tcacaatgtgccaaaacaactgcacacattggaggcgtttttgaatgtgatattcaggcgaccttgccaagc

SEQ ID NO: 3809 - DNA, 72 bp, Homo sapiens
tcatgaggcaatgaagccaatgatttgttcattctcggagggaattttctttctttttttcatttcctgggt

SEQ ID NO: 3810 - DNA, 72 bp, Homo sapiens
aaatgagatgctgagtctagagaggaaaaaggactcgctgcattgcacaacttgttcctggcgtaactggag

SEQ ID NO: 3811 - DNA, 72 bp, Homo sapiens
ttttgtctgctacagaatttctcagctctccagctcgttggctcaaagtgtgtcaggaaagggggtgctggg

SEQ ID NO: 3812 - DNA, 72 bp, Homo sapiens
ttatggaaggaatgagagcaaaggctgtgattgtacgtgcaactgtcatcttgctgggattgtgtaatgtca

SEQ ID NO: 3813 - DNA, 72 bp, Homo sapiens
ttgctgtgctgctgccccacagtcctctggtatgacggatctccatatcctatccaccctccactcccctgt

SEQ ID NO: 3814 - DNA, 72 bp, Homo sapiens
acaactttactcggcactactgttactgaattttacgttttggttccttaatattttggatgtagtcatagt

SEQ ID NO: 3815 - DNA, 72 bp, Homo sapiens
gtccaggcttgaatctcgggtctttacttgggcaacgggcaccatgataccctatgttctggggattagcag

SEQ ID NO: 3816 - DNA, 72 bp, Homo sapiens
ttttagtgtttacttaagctcctttgggctgcctccgtggtagctatgagctcacagagaagtaagtacagt

SEQ ID NO: 3817 - DNA, 72 bp, Homo sapiens
caccaccagggttgccaggctgcgaatcccattcccgcagacggggacctggttcctggccctccgctccct

SEQ ID NO: 3818 - DNA, 72 bp, Homo sapiens
aaacaaacgcctggaacaaatcctgcaaaggagagcgcctgtgtgcggcccactgtctaactaggtcagcct

SEQ ID NO: 3819 - DNA, 72 bp, Homo sapiens
ccgccctcccgggttgtggctgagcccacgggaggcgcgtatttcccacgccatcgctggctgcgcttgctc

SEQ ID NO: 3820 - DNA, 72 bp, Homo sapiens
cctctgctcctggggagccctgggaagggcgattccgcgttgcctctaagaacttctttcctaccccacttc

SEQ ID NO: 3821 - DNA, 72 bp, Homo sapiens
gcgggaactggggatggatcccaaagcctgcgtcccgatcccttcggtaggagtaggttcctgcaatggttg

SEQ ID NO: 3822 - DNA, 72 bp, Homo sapiens
gaaggcttacgtgtcaaagtcattgatcggcactgcggcaaggtagagagggaaagacagatggcctgacct

SEQ ID NO: 3823 - DNA, 72 bp, Homo sapiens
acatgcaggtgaaacctagaggagaaggccacagacgctggaagaacttggtcttgctgtctcttccactga

SEQ ID NO: 3824 - DNA, 72 bp, Homo sapiens
ttcagggtctctcttggtcacttctcatgtttctgcgtccctgtcggtcactccctctgtccctctgtgttc

SEQ ID NO: 3825 - DNA, 72 bp, Homo sapiens
catcgtctgagatgtggggagcacctctgccctgccgccctgtctgggatgtgaggaccgcctctgctgggc

SEQ ID NO: 3826 - DNA, 72 bp, Homo sapiens
ctcaaggggtttctggcacctacctacctgcttcccgctggggggtggggagttggcccagagtcttaagat

SEQ ID NO: 3827 - DNA, 72 bp, Homo sapiens
caggcaggctgaggccagctcaggggcaaccacaccgtggttggtcctggagggggccccaccccaaccccc

SEQ ID NO: 3828 - DNA, 72 bp, Homo sapiens
agttggttctgacactcccttccctccctgccaaccgccctccatcttttctctcctgtcttcctctctgtg

SEQ ID NO: 3829 - DNA, 72 bp, Homo sapiens
tggagagcccggagggcagccaggaccgtgtcagacggcaggagtcgggcggggccactccaggcaccggcc

SEQ ID NO: 3830 - DNA, 72 bp, Homo sapiens
cacagatagcctgtcttcctgccttccctcctgcccggcagagggagggagagagggggaccagccggtcca

SEQ ID NO: 3831 - DNA, 72 bp, Homo sapiens
aagcatcagctcctgctgtggctggaaatcgagctcggaagatgtcagttgcagctctgtgaccttcaccct

SEQ ID NO: 3832 - DNA, 72 bp, Homo sapiens
tcttttatttcctttggccactgtgattgatttcacgatggatccatgaaccaagaaaggcaatcaaggcta

SEQ ID NO: 3833 - DNA, 72 bp, Homo sapiens
ctgctcttgaaacaggccccctggatccaggctcacgaggaaagttctgccaagtcttggtcactaaagagc

SEQ ID NO: 3834 - DNA, 72 bp, Homo sapiens
acaagactgttaacagttctagagctcgtgggctccgcagggcagcagtcaccctaccaccaggtcccagag

SEQ ID NO: 3835 - DNA, 72 bp, Homo sapiens
tgctttagagatcaatatgcgttgttactggtgaacggcagaagtgtatagggattagtggctccattgctg

SEQ ID NO: 3836 - DNA, 72 bp, Homo sapiens
aaacatcaaagctcagatgtaaacccaggtctgtccgattttacaacttcagcttccttattttgactgtaa

SEQ ID NO: 3837 - DNA, 72 bp, Homo sapiens
tcagggagccttttctgatcctcaggtcaggttcccggtccaatcccacagccccccgcgtgtctccctgac

SEQ ID NO: 3838 - DNA, 72 bp, Homo sapiens
atgcaggagcttcctgtggagtttcatcactctggcgggcagcactcttaataggatttttacagtgtaact

SEQ ID NO: 3839 - DNA, 72 bp, Homo sapiens
ttgatttgaatttccacttccaatctgtggtgcaacgtatgtaacacagcaaatcagtaaggctttatcaag

SEQ ID NO: 3840 - DNA, 72 bp, Homo sapiens
agacatagccccagccctggcttggggccaagtttcggaattagtacaaagagaagcaaaggctgcaggtcc

SEQ ID NO: 3841 - DNA, 72 bp, Homo sapiens
gtcggatacagcttggttcctccttcacttgtgagcggttcattttcctcatgatcctgtaacttgggggca

SEQ ID NO: 3842 - DNA, 72 bp, Homo sapiens
ggtgccggccccacgcggcgcctgagcctccagagcgcgaagcctccaagcctgctgcaggccccgcctcct

SEQ ID NO: 3843 - DNA, 72 bp, Homo sapiens
accagaaacctgtggctaggctaaaggtagccagacgcaggcaaggccaacagcctctgaaggggcgtggct

SEQ ID NO: 3844 - DNA, 72 bp, Homo sapiens
cattctatgccctccaggcttctacctcttccctgcgctgattagactgtggatgagccaatgagtgagggg

SEQ ID NO: 3845 - DNA, 72 bp, Homo sapiens
gagcgtctcggggctgaggaagagggaggattacacgcagcccactggctttgcaacctcgtctgtagtggt

SEQ ID NO: 3846 - DNA, 72 bp, Homo sapiens
aactgatttttaagctgcattgcataactgtgttacgtcatgtgggtgtgtctatgagctaacttttcacat

SEQ ID NO: 3847 - DNA, 72 bp, Homo sapiens
cttcctgcttacctgctctttccttcctccttggtcggaggaggggctggctcactgctctggcttcatttt

SEQ ID NO: 3848 - DNA, 72 bp, Homo sapiens
tgcctcacttttcactttcgcgcctacattttcttcgctccctaagttatacaagatgtacatttcctctct

SEQ ID NO: 3849 - DNA, 72 bp, Homo sapiens
agaatgttttttttcatttgctattcagctctgtacggctgttgttcagatccaccatccttaatcccatga

SEQ ID NO: 3850 - DNA, 72 bp, Homo sapiens
gagcagctccatcacggtcgtccgtgcagcttgggcgtatgggaatacgtcagaggcgttttgctcgccttt

SEQ ID NO: 3851 - DNA, 72 bp, Homo sapiens
tgtgtcagcatcctgaatagctgagattacatgcccgtgtcaccaccccagactaaattttttttttttttt

SEQ ID NO: 3852 - DNA, 72 bp, Homo sapiens
tgacttgtcaatcatcattagggtgatgtcccaaacgttcaagtctgaggcccagggaaattggcaacagct

SEQ ID NO: 3853 - DNA, 72 bp, Homo sapiens
tttttttctttacaagcatgcatcatactagtgtccgttttacaatatatttgtttgttttttgagatgggg

SEQ ID NO: 3854 - DNA, 72 bp, Homo sapiens
ctgtggctcagactcggcaaaaagcaacaacttcccggattagtttctatgcagagccgaggctctcacaag

SEQ ID NO: 3855 - DNA, 72 bp, Homo sapiens
tgaggctgtgacccacagctggcactggtcacctccgctgtctcctcttcctctctcctccttccctcacac

SEQ ID NO: 3856 - DNA, 72 bp, Homo sapiens
gctttggggatgggctcggaccatcgctggggcagcgatggggctctgggaagaaaccacagagagaaaaaa

SEQ ID NO: 3857 - DNA, 72 bp, Homo sapiens
ggaataatggggtgctcctgtagctgttagtaagacgatggtgtgcctggggatttgtgctatacaccacag

SEQ ID NO: 3858 - DNA, 72 bp, Homo sapiens
gatggtggcggtggtaaggggagttcctctgactccgacctcatgtctttggcaggagttgaaatgaataat

SEQ ID NO: 3859 - DNA, 72 bp, Homo sapiens
gctgtttactggttaccactagctggaagagaaggcgaaagtgtaaagaacagaatggcataattggcttag

SEQ ID NO: 3860 - DNA, 72 bp, Homo sapiens
gttcgttgcaaaatattccttgtccgtgatcagcacggcacacactatcagactcactctgccaacacaatc

SEQ ID NO: 3861 - DNA, 72 bp, Homo sapiens
gattggcctcacccacaatgactgggtggagccaccgaaagaaaggcatggagcaacacttcttcctgcatc

SEQ ID NO: 3862 - DNA, 72 bp, Homo sapiens
ggagagcaggtcctcttccacgtgggcctggggaccggtgctatgaggacactgctagggctgaaggtcctg

SEQ ID NO: 3863 - DNA, 72 bp, Homo sapiens
tttccaagctattgttattgcagactatcttccttcgttatgtagtcactgaagtccttgttcctcagcttg

SEQ ID NO: 3864 - DNA, 72 bp, Homo sapiens
tggatgaggaagaagaatctcccactcagcgattacgaaagtgaaggaatcaagtctggcctatcatcttca

SEQ ID NO: 3865 - DNA, 72 bp, Homo sapiens
tcggctgctctgaaacacaaggccgccgctgagggcgttgggccagcctctccagcaggcgccatcctgccc

SEQ ID NO: 3866 - DNA, 72 bp, Homo sapiens
agctcaacatataaacactttccctttgacctgtccgttctccaggcttcatgactttctacattcaccaag

SEQ ID NO: 3867 - DNA, 72 bp, Homo sapiens
attcattcagaagccgctgcagaggctgggggtggcgaggctgtggaccccacagaacagcctttagaaggg

SEQ ID NO: 3868 - DNA, 72 bp, Homo sapiens
cgtggccacccacctggggccagaaagagcccctccgctgcccccagagcatgggtgaagagacgaacgctt

SEQ ID NO: 3869 - DNA, 72 bp, Homo sapiens
gggggttgggggcagctttcacaagccactgcctccgctgactgaccttggcagactcaccttgggcagctt

SEQ ID NO: 3870 - DNA, 72 bp, Homo sapiens
ccagccggtccagggctgtgggaaggaggcacacccgggagtccactgccggaccggggttcccagctgctc

SEQ ID NO: 3871 - DNA, 72 bp, Homo sapiens
cgcctctccccaactctaacttccacagttcttcacgcctgttcctctggaaagccctccctgattgcgcct

SEQ ID NO: 3872 - DNA, 72 bp, Homo sapiens
tgcgtaacagtgagcagacgttctgagaaatgcatcgtcaggcaattgcatcattgtgcaaacaatatagag

SEQ ID NO: 3873 - DNA, 72 bp, Homo sapiens
agccaaagtgtttgcttctccctttctgcggccttcgccagcccaggctcggctgccacccagtggcacaga

SEQ ID NO: 3874 - DNA, 72 bp, Homo sapiens
aacgtcctgctggaggttgtgccagacgtaccccccgagtactactcctgccggttcagagtgaacaagctg

SEQ ID NO: 3875 - DNA, 72 bp, Homo sapiens
ctgagaattacatcacagcacggtaagcgtcactgcgtgctgctccacaacgtgggacggccctgagtcacg

SEQ ID NO: 3876 - DNA, 72 bp, Homo sapiens
ctggtgcagacagcctagctggactttgggtgaggcggttcagccatgaggctggctgtgcttttctcgggg

SEQ ID NO: 3877 - DNA, 72 bp, Homo sapiens
tatcactttttccagtcactgatttggaatatttgcgttttttaacttctctttgtcagatctcaggctgcc

SEQ ID NO: 3878 - DNA, 72 bp, Homo sapiens
gtgattttaccccactccatctggggcgcgcccggcgcagacaggactgcagagaaaagggacagggagggg

SEQ ID NO: 3879 - DNA, 72 bp, Homo sapiens
cggtggactgtgttggtgcgcgggtcaggctttaacgtgcctagtggaaattgacagtctgagaactgggac

SEQ ID NO: 3880 - DNA, 72 bp, Homo sapiens
actgcgcatgaaagaagaaacccagagagaattttcgggaaagagaatggggctttgaaaccaatcagaact

SEQ ID NO: 3881 - DNA, 72 bp, Homo sapiens
ttagcattccttaatcatttgtaaaccacccacttcggattttgtatgtggtatgtttctaaatacgaattc

SEQ ID NO: 3882 - DNA, 72 bp, Homo sapiens
aggatgtccacaccagcgggctccacacgcacatgcgctccggcaggttcccctcggggacacacacgcaca

SEQ ID NO: 3883 - DNA, 72 bp, Homo sapiens
ccagtggccccaaacatccgcctctgaggagttgtcggagagtcgaactcagcccaggagtttggggattca

SEQ ID NO: 3884 - DNA, 72 bp, Homo sapiens
cgaggttagcctgaatctctgcaggggcctcgcgccgaaggctggggtgggagagcgcatgcgtgcctgggg

SEQ ID NO: 3885 - DNA, 72 bp, Homo sapiens
tctcaggtccctgaagtcctgtcctctcccggagccgatgtgttctcagctcctgggccgcagctcctggag

SEQ ID NO: 3886 - DNA, 72 bp, Homo sapiens
tccaccagagaagtgtgagactccgggttcaggaacgaggggcactcacgcatggctctgctatgcccacgg

SEQ ID NO: 3887 - DNA, 72 bp, Homo sapiens
aagcacacatcttttatgattctacttacgtgaaacgtccaaactagatatatctacagagagagaaagtag

SEQ ID NO: 3888 - DNA, 72 bp, Homo sapiens
cctggcatccgcctcactgtaatactcccgggccacgatatcttcaaacagttccccaccagtgaccctggg

SEQ ID NO: 3889 - DNA, 72 bp, Homo sapiens
gggaaaaagtggtcatagcacacatttttgcatcccggttgcagtgtgttgcagacgaagtcctcttgctcg

SEQ ID NO: 3890 - DNA, 72 bp, Homo sapiens
gtgggctctctccactcgctgcctaggcccttcgacgctcccacccagaaatgatgacatggctagtgaggc

SEQ ID NO: 3891 - DNA, 72 bp, Homo sapiens
aactccaagacgttcacacagtgacaaaatcgcctcgtcatgcatttctcagagtgtgtccctgtcgctaag

SEQ ID NO: 3892 - DNA, 72 bp, Homo sapiens
tgtatagacccttttccatgagaggaactgaagcccgggtggaccagccagaacatgaaaggatttggggac

SEQ ID NO: 3893 - DNA, 72 bp, Homo sapiens
tttaaaataagtaattttcctctggattaaagcaccgaaggcttaaccctgaccttgtgttaagaaggaagt

SEQ ID NO: 3894 - DNA, 72 bp, Homo sapiens
tttccgagcccgaaaccagatggagtcatgagctgcgaaataagcgatccaggctccacaaagttccgatga

SEQ ID NO: 3895 - DNA, 72 bp, Homo sapiens
acttgaactcttccatcctctcagcctcaggaggtcgatcttaaccaaacaccactccacagatgaggaagc

SEQ ID NO: 3896 - DNA, 72 bp, Homo sapiens
aattgggtgtggtataaccttacttacaacattgccgccagcattaaatgggtgagagtgcatagaacagtg

SEQ ID NO: 3897 - DNA, 72 bp, Homo sapiens
ctggtatatgagcaggcgatgaaaggtacgtcccacgtccggcggcaggagctggcggccatccaggacgtg

SEQ ID NO: 3898 - DNA, 72 bp, Homo sapiens
tctcactctgctaatctttaaatgtaaattctctccgccagctaagaggagcgacagataacatgttacatc

SEQ ID NO: 3899 - DNA, 72 bp, Homo sapiens
caaggttattgggaagattagagatatggggtacacgaaacttgtgtacctggtgcaaagaaatgcttggtg

SEQ ID NO: 3900 - DNA, 72 bp, Homo sapiens
ctgccggctggaggcgggcaggacggacgtgccggcggaaccgtgagcctccgacggcctgagaccttcatt

SEQ ID NO: 3901 - DNA, 72 bp, Homo sapiens
cgcatggaagagtcctgagccttgctgggttgaggcggttggtcattgtagagcaggaaggcgagctgcggg

SEQ ID NO: 3902 - DNA, 72 bp, Homo sapiens
ctacacagctgattaggggcagagttggggtctcccgtagccaggccctgtttttttccctgcacaccactg

SEQ ID NO: 3903 - DNA, 72 bp, Homo sapiens
ctgaggcttgcaaacctctggtaagaagcacagaacgcagggctctccttcatgctgccctgggccccagct

SEQ ID NO: 3904 - DNA, 72 bp, Homo sapiens
gttgattgaggtggatcacgagggatgcctctctgcggaggcgatgcccacatcgaagctctcaggatgaga

SEQ ID NO: 3905 - DNA, 72 bp, Homo sapiens
taaggcttctctaccatttggagccttaagtttcccggtgaggctaagaatcccatttctgactctaaatcc

SEQ ID NO: 3906 - DNA, 72 bp, Homo sapiens
tgtgtatagaataagtgtgtcatgcaaagtttggtcggagttcctaaaagaacaaggagttggatcttcacg

SEQ ID NO: 3907 - DNA, 72 bp, Homo sapiens
tccaagatctcctggggcagacagtctggccacagcgtgtttctctgtggccccgtgcggggcgaccttgct

SEQ ID NO: 3908 - DNA, 72 bp, Homo sapiens
ccgaagaaggaaggtgtggagaggaggggccgggccgagagcaaataccgcctttttggtgcagcagcagcc

SEQ ID NO: 3909 - DNA, 72 bp, Homo sapiens
tgagccctttgacctagccgctgtttactcctacacggccaccaggaatagccagagaacctcgggccagag

SEQ ID NO: 3910 - DNA, 72 bp, Homo sapiens
agagcccaatgaggtggtcaggttgcaacagcaaccgggcgtgttaaaacctagttcctttgaatatgtttc

SEQ ID NO: 3911 - DNA, 72 bp, Homo sapiens
cctgtcagggttggctctttaatctgtcgtgccctcggtattgctctttgtctgcccgtgaataaagtgcag

SEQ ID NO: 3912 - DNA, 72 bp, Homo sapiens
tgaggcagctcccgtggtagatcaagcctcacaggcggctggaagagccagttctgggctgggcctgtggga

SEQ ID NO: 3913 - DNA, 72 bp, Homo sapiens
cctcgctctagttccttccttttcttataaggactcgatctcatcggcgagccccaccctcacgatctcacc

SEQ ID NO: 3914 - DNA, 72 bp, Homo sapiens
gctataaacagctacagacacatcttcagtagtaacgcactggagtgtggaaatcaattgtgaattaaactc

SEQ ID NO: 3915 - DNA, 72 bp, Homo sapiens
agttcttctttcatccactggtgtattcctttggccggggacacacacatttgagaaacttcccagcttccc

SEQ ID NO: 3916 - DNA, 72 bp, Homo sapiens
gtgccaataccaaaccgaagatgctgcgttggtggcgtctctgcctcttgggtcaactctgcagtctggctg

SEQ ID NO: 3917 - DNA, 72 bp, Homo sapiens
gaaagaagcacaaatgagcctcagttaacatacctcgaagaaatttcttaactcacacacacaaaaaacttt

SEQ ID NO: 3918 - DNA, 72 bp, Homo sapiens
taacatgctctgtgaccttgatcaacagctttccccgctcttggccttggtgtcctaacttaaatggggaaa

SEQ ID NO: 3919 - DNA, 72 bp, Homo sapiens
ctggctgccagcacctgtttcctgtcttgctgtgtcgtccactcatggcctctcaaaaagccactgtaacta

SEQ ID NO: 3920 - DNA, 72 bp, Homo sapiens
cccagtccaggctttgcctcagagaattgctaactcggcctcagtttctccaggaacagggcaaggaccagc

SEQ ID NO: 3921 - DNA, 72 bp, Homo sapiens
tatgtcagctaaaaaaatgtacccttgtctcattgcggtaaaagagcctccactgctcagatgcttctgatg

SEQ ID NO: 3922 - DNA, 72 bp, Homo sapiens
ttcttaatgccacagtcaagagaagatccataacccgccttggtcatctgcccttctgtgttcacaaccgtt

SEQ ID NO: 3923 - DNA, 72 bp, Homo sapiens
gccgtgccgggagcataaagccaccagggccgctgcgttgccactgccttgcacccccgggagctggggaac

SEQ ID NO: 3924 - DNA, 72 bp, Homo sapiens
acacacacgctccccacccccacctgcaaagctgccgtttgattagccaacctggcctcggacggcgtttgt

SEQ ID NO: 3925 - DNA, 72 bp, Homo sapiens
ctccctccagagacacacttgggtgcagggaccttcgcaggccccagatgcgcaggactcagtctgaacagg

SEQ ID NO: 3926 - DNA, 72 bp, Homo sapiens
tgtgggtgatggtggctgtcaggcccctgaacctacgtcatccctccctctgatttgactgtacctttgcta

SEQ ID NO: 3927 - DNA, 72 bp, Homo sapiens
gcttgaggaaggaaagacacattgccgggctacagcgcagggcccattgtcatgctgagccacccttgcttc

SEQ ID NO: 3928 - DNA, 72 bp, Homo sapiens
acgaaggagtgggtggaggaggggtctctggtgctcgtcctgtaggtggatcgatgtgaaagcagtccactg

SEQ ID NO: 3929 - DNA, 72 bp, Homo sapiens
cagccctacccagaggtcctgggtccaccctccctcgccaatcctccccagggttccagagatggccaccag

SEQ ID NO: 3930 - DNA, 72 bp, Homo sapiens
tttacacatacaccatgtgatccataaaattaagccgtcagattccataaaactcagcagcttattatgcaa

SEQ ID NO: 3931 - DNA, 72 bp, Homo sapiens
ccctacatgcaccgggccgggactctgaccagcctcgagagtagccactcagtgcccagcatgtccatcagc

SEQ ID NO: 3932 - DNA, 72 bp, Homo sapiens
cctgtgtgaactgttgcctcggcctcataagttatcgtttctttcagcctcagcccttctaacacttctgca

SEQ ID NO: 3933 - DNA, 72 bp, Homo sapiens
cccttcctctttgcacccgactgctataaaaagcacgcctcactcccacttggctcgacaagcagccgccct

SEQ ID NO: 3934 - DNA, 72 bp, Homo sapiens
tgcaggttcccaacctgtgctgacacatccaggaacgctggcaacttagttcccaggcgcagtttgagaaat

SEQ ID NO: 3935 - DNA, 72 bp, Homo sapiens
agcagattgtggaggcgtggaaatgccatgccctgcggagaggggatgaggcccggggcgccccgtgtcgcc

SEQ ID NO: 3936 - DNA, 72 bp, Homo sapiens
aacgtgtacatttattacccggcctgtgagcacaacggcttggggctcccttggaggagaccggccctgctt

SEQ ID NO: 3937 - DNA, 72 bp, Homo sapiens
gggccacttgcacacatgccttcagcccctggtaccgtcttctctccccgggtcgcgacactgactcgtcaa

SEQ ID NO: 3938 - DNA, 72 bp, Homo sapiens
acatcttttcactacacatttactaagcctcttttcgaagccacgccaggttagataccatcccaattacta

SEQ ID NO: 3939 - DNA, 72 bp, Homo sapiens
cgttgatccagttcactcctagtttctaggcaagacggtactcaaactgtcccagaaagagagtcatctact

SEQ ID NO: 3940 - DNA, 72 bp, Homo sapiens
aagaaaggagtagctgtaatctgaagcctgctggacgctggattagaaggcagcaaaaaaagctctgtgctg

SEQ ID NO: 3941 - DNA, 72 bp, Homo sapiens
catcgtcacccattcagaggacagcaagatctgggcgggaaaacaaaagtcacaaagaaatttgtttgccac

SEQ ID NO: 3942 - DNA, 72 bp, Homo sapiens
gattgttttctcagcctaaggaaggtgggaggtgccgagagttggaggcacagagagcactccaacttgtcc

SEQ ID NO: 3943 - DNA, 72 bp, Homo sapiens
aaattaagatctgtcaaagtaacgcccattagaaccgtcttcaaagttgtcatgtgcacgtgtgtgtacgca

SEQ ID NO: 3944 - DNA, 72 bp, Homo sapiens
ccgtctgaggtacaaggttagaagccacagacacccgagctgcagcctgacccacacaagctgcgggcgcaa

SEQ ID NO: 3945 - DNA, 72 bp, Homo sapiens
gtccgggagccgggcttccgggtggctggccggcccggctcttacctgcaccacccatccctggccctgcag

SEQ ID NO: 3946 - DNA, 72 bp, Homo sapiens
tcacttgtgtaagccacacacctaaaataagcccccgcaggagactctgggaatttcctgtaattttcactg

SEQ ID NO: 3947 - DNA, 72 bp, Homo sapiens
ccaacccaaccctgccagcgtgcccggcccaccagcgatgtcacaacacacagtgctgagtgcccgatgtgg

SEQ ID NO: 3948 - DNA, 72 bp, Homo sapiens
ctgggcctactgcaaagatcattgagtacctcctgcggtcccagtctctctttctctccttactcctggatt

SEQ ID NO: 3949 - DNA, 72 bp, Homo sapiens
ggaactgatgatccaatgggggagatagacctgcacgtgtttaataaaaggaagtggctattccggtttctt

SEQ ID NO: 3950 - DNA, 72 bp, Homo sapiens
cttgggtccaggagcacacagtggctgccttcctccgggtcctcctggtccctgcaggtcatgggctggagg

SEQ ID NO: 3951 - DNA, 72 bp, Homo sapiens
ctcccaggtggtgacaatgcagacggtaagaacatcgctgtcagctgcaaggttacatgtatctgggtagag

SEQ ID NO: 3952 - DNA, 72 bp, Homo sapiens
gctgatgaagtccctgaacactgagaagtctggctcggggctcggcggcccctgcggcagcgagtggcgctc

SEQ ID NO: 3953 - DNA, 72 bp, Homo sapiens
ggtaatggggtggtggggtacacaaaagcagaaatcgcacttcacacatttaggcctcatttagacaatgag

SEQ ID NO: 3954 - DNA, 72 bp, Homo sapiens
tttccgtctgggtgagctggggctgaaggccgggacgggaccctctgcagaggccatgcgggactggggcca

SEQ ID NO: 3955 - DNA, 72 bp, Homo sapiens
agcctttgccggctgcactgacttagcagagtgggcggtaggcaggctccagagtgctgtctggcaagatag

SEQ ID NO: 3956 - DNA, 72 bp, Homo sapiens
tgaggcccgtgtttgcaggaccagggccggccttccgattccccattcattccagaagcaccgaaccacgct

SEQ ID NO: 3957 - DNA, 72 bp, Homo sapiens
cagctttgacgggtgcagacaacaggaaagaacaccgcagttagcacaggggttggtgccatcagccctaat

SEQ ID NO: 3958 - DNA, 72 bp, Homo sapiens
cctagctttgagcctggtctcagatgttccttttccgttctctgtccagccgttaccgcccccagtctgtaa

SEQ ID NO: 3959 - DNA, 72 bp, Homo sapiens
tgtttgggttgcaagaaagagactcactccagttgcgtcataggatggagttttattgggaggacattctgg

SEQ ID NO: 3960 - DNA, 72 bp, Homo sapiens
cctggcagcttccccaggagagtgcgggtatgggccgggccgggagagggctggctgttgcgaaatgcccag

SEQ ID NO: 3961 - DNA, 72 bp, Homo sapiens
gcgagcgcttcccaactggcctcccgccttcctctcgtcctctacggcctccattggcagctgtgcaagggc

SEQ ID NO: 3962 - DNA, 72 bp, Homo sapiens
ctctccttctgatcttgggtggtggctgtgagatccggccccaactggcctctcagatgaagttcccccaac

SEQ ID NO: 3963 - DNA, 72 bp, Homo sapiens
cctggaggaggaagtgttttcgagggtgcagactgcgggaaatgggacaataggagacaagattaggtcatg

SEQ ID NO: 3964 - DNA, 72 bp, Homo sapiens
cccccaggcgtcttgctgatactctgtgatgtttccgtttcattttgacttaccttgtgcaattctttgtgg

SEQ ID NO: 3965 - DNA, 72 bp, Homo sapiens
cacagcgagggcacatgaagatgaagtgctgcgcccgcatgtggaagaccagcttctccacgccctggaaca

SEQ ID NO: 3966 - DNA, 72 bp, Homo sapiens
ggagtctcatcccgggacgtgtgagtgcacttcagcgcaggactgccctggactggggagaccggagccgcg

SEQ ID NO: 3967 - DNA, 72 bp, Homo sapiens
ccctccgagattggaggcgcgcaccaccgtctcgccgatgtgccaccctgggctgcagctgcagcttcgtgg

SEQ ID NO: 3968 - DNA, 72 bp, Homo sapiens
ccttgtgtaataatatacaaatcatctgcatggaacggcccagaactggcaagagatgtaggttgcgtgaat

SEQ ID NO: 3969 - DNA, 72 bp, Homo sapiens
acgggagtttggagaagattgaggagggctgctgacgaaggcgagagcaagcctcaagccttgcttacagga

SEQ ID NO: 3970 - DNA, 72 bp, Homo sapiens
tggacccttcctcatctgtgacctccttagagcttcgtcctctgggtctagagagcaggcatcattaatctg

SEQ ID NO: 3971 - DNA, 72 bp, Homo sapiens
ggcttcccggggccgggcgtctcccagctcagccccgcagcagcaggtctcactcgctgtgtcacgctcccc

SEQ ID NO: 3972 - DNA, 72 bp, Homo sapiens
gacttttgccacaggtgccagcagacaacatacttcgtgaaatatttctcctatatggtgtatgtcccccta

SEQ ID NO: 3973 - DNA, 72 bp, Homo sapiens
ccagaggacagttataaaatctgtggtcattctgccggcagcgtatagttttcacccagagtccagatccca

SEQ ID NO: 3974 - DNA, 72 bp, Homo sapiens
caagaagggtgttggcaagtgttatctgtaaggaccgtagtgaataagctgggcttgggcttgccagaccgg

SEQ ID NO: 3975 - DNA, 72 bp, Homo sapiens
ccttgagccgccgtcacggggcagcacggaaaacccgttgctgctccataaacagcacgtggctcccattac

SEQ ID NO: 3976 - DNA, 72 bp, Homo sapiens
tggttttggaatcaaactgattgtgtcgaaatctccgatgaagcatttactagttgtgcaaccttgaatgca

SEQ ID NO: 3977 - DNA, 72 bp, Homo sapiens
gtttcgtcatttgtaccttagaatgttgctgtgagcgttaaactacagtgcccagcacacagtaacagttta

SEQ ID NO: 3978 - DNA, 72 bp, Homo sapiens
atgcaggcttggggttggagagccagctggagggacgggtcccgccgccagctccctgccacgcatgaactc

SEQ ID NO: 3979 - DNA, 72 bp, Homo sapiens
tcccagctctttggaaggccgaggcgggaggatcacgaggtcagatcgaggccatcctggctaacacggtga

SEQ ID NO: 3980 - DNA, 72 bp, Homo sapiens
aattcatgcctgtgcatgcccaagcaataaaattacgcaagttgcccagaggcccagcttggttcagtgcca

SEQ ID NO: 3981 - DNA, 72 bp, Homo sapiens
ttggagttacactgcctgggttcgaatctcaattccgccactgccattcgcgcgttttctattgccagccac

SEQ ID NO: 3982 - DNA, 72 bp, Homo sapiens
gtatgaagtctgtctgtgaatcacctcacgggagacgggaaaaacccgctcctccccaacctgggctccgcc

SEQ ID NO: 3983 - DNA, 72 bp, Homo sapiens
gggctgtgcggggagatgcggtggagaggaagagccgccggggtgttgagaaacgatgatttcaaaaacttc

SEQ ID NO: 3984 - DNA, 72 bp, Homo sapiens
tgacggaattctgcagcggctccagccagggtcgtcggggcggggtgggtgctcaggggcggcctttgtgtt

SEQ ID NO: 3985 - DNA, 72 bp, Homo sapiens
acccttcaatttgaaattgagaataaaacagaagtcgacaagttgaggtagcttgtgacatcagtatttcgt

SEQ ID NO: 3986 - DNA, 72 bp, Homo sapiens
atccccttcctcccttgatgtcaagagaggaagcacgtgtgctactgtggttgaaccttggaagggtcgggc

SEQ ID NO: 3987 - DNA, 72 bp, Homo sapiens
attctacattacagcaaaacaagaggagtactgagcgttggtgcctcctcctccttgcctctgcctgtccct

SEQ ID NO: 3988 - DNA, 72 bp, Homo sapiens
gttctttcagtctctctggctgagctcccaccaggcgagaagccagtaagtgggatcaagccacgtgccccc

SEQ ID NO: 3989 - DNA, 72 bp, Homo sapiens
tggagaaggaagtgaattaacccagcccagagggacggatgaatgactaaaaggaagtgacatcagaactgg

SEQ ID NO: 3990 - DNA, 72 bp, Homo sapiens
agaccagctcagtctctcacccactgtgtcttcctcgttccagtgagctgaggctgctgccaggccactgac

SEQ ID NO: 3991 - DNA, 72 bp, Homo sapiens
gcacccagataaacgtaacaaagctaccattttctcgactaaaggtcacattgtaatctcccaaggaagtta

SEQ ID NO: 3992 - DNA, 72 bp, Homo sapiens
ctcactgccccccacacacatgtcctccccagacccggagaaaggcaaacactgtggccattcagagcccag

SEQ ID NO: 3993 - DNA, 72 bp, Homo sapiens
gggaatggctataggaagggctggagacagcatggcgttgtcattggttgcatcaggtggttggaaatgcag

SEQ ID NO: 3994 - DNA, 72 bp, Homo sapiens
cctcaacgcccccgctcaaggtggcaggtgtgcaccgcagaagccggccccgcagtcacgggccagaaagct

SEQ ID NO: 3995 - DNA, 72 bp, Homo sapiens
cagaccggactcggaatccgcaggctgggccatttcgccttcgcccgcatggggaggcgcccctccgcgagc

SEQ ID NO: 3996 - DNA, 72 bp, Homo sapiens
tccgggggcagcctctcctctagggtctctgtctccgcttccccgagaagcctctaaacccgagggctgggc

SEQ ID NO: 3997 - DNA, 72 bp, Homo sapiens
gtgtttggcagagattcaactaattgttacactctcgaattcattcgttagcaggtaatctttgagtgccca

SEQ ID NO: 3998 - DNA, 72 bp, Homo sapiens
caccagcgttccgcttgccctctcacttaagcgcccgctgtgcttggggctgcgtggcagagggaacttgcc

SEQ ID NO: 3999 - DNA, 72 bp, Homo sapiens
ttacctcatgtggtataaacttaccaatgactccccgttgcctagaggctcaaattgctagcatggcctggc

SEQ ID NO: 4000 - DNA, 72 bp, Homo sapiens
tgcactttgaatgactaatttaagccattacattacgaaataagggataaatcatacttttcataacactac

SEQ ID NO: 4001 - DNA, 72 bp, Homo sapiens
agccatagcctgatactcctcaggacacctcatcacgcccactgggaacatggcacacactggagattccag

SEQ ID NO: 4002 - DNA, 72 bp, Homo sapiens
tggacttcttgcttctttcgtgtaggacaggctgtcgaaacctcagtggataaaagacctagagaatgtgta

SEQ ID NO: 4003 - DNA, 72 bp, Homo sapiens
tgtggcctccatagctcagctcccagctgcacagccggcttctcagaattgggccttgaccaagaatctggg

SEQ ID NO: 4004 - DNA, 72 bp, Homo sapiens
cccctccatatccaatttgctcttgccacagcgggcgcgtcttcgtggttacaaagcgctttttccctgatg

SEQ ID NO: 4005 - DNA, 72 bp, Homo sapiens
gaggtgctgcgacgatgagttgcagtgtccagtttcggtttgggattaggaaaacatggtcgcaggaaggga

SEQ ID NO: 4006 - DNA, 72 bp, Homo sapiens
ttgagggattgtactcctcacctttcaatttggaccgaaccttgttggccgtcttcttgatgtctgcagtga

SEQ ID NO: 4007 - DNA, 72 bp, Homo sapiens
ggaaaaaaaacagaaacggttagctacactcagagcgaagagaaggctggtgtgggtgagtcatacggtctt

SEQ ID NO: 4008 - DNA, 72 bp, Homo sapiens
tgccggcaggtgtggccgcacctggtgtgaagtcacgtggagtcagtgctgtggagggaagtcctgtgcggg

SEQ ID NO: 4009 - DNA, 72 bp, Homo sapiens
tggatgcctgggcttcacacaagaaccacctctcccgcagttcccaaggacttgtcatttcatgttcttatt

SEQ ID NO: 4010 - DNA, 72 bp, Homo sapiens
ctttatcttctaatgatggagtattccatcttagacgtgtagatactgctgctagatatttataacctggta

SEQ ID NO: 4011 - DNA, 72 bp, Homo sapiens
ccagcctgggggctgcatcagtggggctggtgagccgcgaactgggacgagggaagaaccgaaccgaggcca

SEQ ID NO: 4012 - DNA, 72 bp, Homo sapiens
aaccgaacggtgagtagttcaagaccacccagggacgcctgttctagcttttaaagcattcatgtattatca

SEQ ID NO: 4013 - DNA, 72 bp, Homo sapiens
ctgtgaatggcattggaaggccgttccagcgcggccgctgaggcagccacttcccccggtgctgggggcgga

SEQ ID NO: 4014 - DNA, 72 bp, Homo sapiens
tccaggcaccgggaataacagaagccagctgagagcgcctgcgcggctgtcggttgatggggaggtcaggtc

SEQ ID NO: 4015 - DNA, 72 bp, Homo sapiens
ggcatggcgggaaagtcctacaagactgtgccaagcgagtggcgagtctgtcccgtctctgcccgagcctcg

SEQ ID NO: 4016 - DNA, 72 bp, Homo sapiens
ccttgaaactgccagtctggagggggacggggtagcgtgagggagtgaagttgaaagtgcctcctattagct

SEQ ID NO: 4017 - DNA, 72 bp, Homo sapiens
ggttccaggggagcccccagggcaggtggcatggtcggagaccttggacttgccccaccagtagcctatctg

SEQ ID NO: 4018 - DNA, 72 bp, Homo sapiens
caagctcaccagggttaaggcactaaaggtgatgacgtgacctgtttgttatgaaatattgaagtaattcat

SEQ ID NO: 4019 - DNA, 72 bp, Homo sapiens
ttggtagtttcactgactagtaaaccattggtaatcgtcacttgccagtggaagtcacatgggccctgggaa

SEQ ID NO: 4020 - DNA, 72 bp, Homo sapiens
ggcaggagcaggtcagcggaaggctataaccttagcgagaaggtgacagccacagcacccctccctctgagg

SEQ ID NO: 4021 - DNA, 72 bp, Homo sapiens
ctgactccagagcccaagttctgtttctcgctctacgcgcctgtcaaagactctggtttccgccggatggac

SEQ ID NO: 4022 - DNA, 72 bp, Homo sapiens
atgcttattcttatttagtcctcataggagagtggcgaagggcagcagctttggagcaagggccaccctgcc

SEQ ID NO: 4023 - DNA, 72 bp, Homo sapiens
tcccaaagtgctgggattataggcttgagccaccgcgcctgctccagatgtattacttaatgtcctgcaaca

SEQ ID NO: 4024 - DNA, 72 bp, Homo sapiens
agagcttctcaccagcttgtcagttgctcagcaaacgtatattgagcacctcctgaaagccaagtcctgttc

SEQ ID NO: 4025 - DNA, 72 bp, Homo sapiens
agcaaaaccaaaactttccaaataagccaggctttcgtcagttcctcagaactagttctggtttgactcact

SEQ ID NO: 4026 - DNA, 72 bp, Homo sapiens
cctcgccagagccctgcaagtgagtcttgagagcccggaagaaaagggaccacagcctctatccccagagtt

SEQ ID NO: 4027 - DNA, 72 bp, Homo sapiens
ttaagaagaggaaatgtttgtttggtctccatgctcggatgcctccccctgtggagccccctactggagatg

SEQ ID NO: 4028 - DNA, 72 bp, Homo sapiens
caggctcttggcaggacttgctgtagagtcccagacggagttagccactgagtccttcagcgacccaggaaa

SEQ ID NO: 4029 - DNA, 72 bp, Homo sapiens
tgccatctcagtttcctcatctggaaaatgggaaacgcctcccacaccacggggttgcaatgaggtttcatg

SEQ ID NO: 4030 - DNA, 72 bp, Homo sapiens
gatcatgccactgcactccaacctgggtgacagagcgaggcactcctctgctatccacgtttttagagaaat

SEQ ID NO: 4031 - DNA, 72 bp, Homo sapiens
ggcccctcccgcttcgctctctcttcctcctgctccggctatgtaggatgtgcctgcttcccattcgcctcc

SEQ ID NO: 4032 - DNA, 72 bp, Homo sapiens
tggctgctcgttgcccaatctttcctgatgtcaatcgtggtctggactggacaagggcaggcttgccaagtg

SEQ ID NO: 4033 - DNA, 72 bp, Homo sapiens
atgtaagaggatgttgatagtagtcattaaagattcgggtcgggtattagtggcatttggtagacagaaccc

SEQ ID NO: 4034 - DNA, 72 bp, Homo sapiens
aagtggcgtgtgtctgtatggtgaacgtgtggttccgtgcctgcctttatgtcatgtcagggtgttgaaata

SEQ ID NO: 4035 - DNA, 72 bp, Homo sapiens
caggaagcgagcagcagggccagaggctcatctgccgagtagagctgctggggctcggggactcagggcaca

SEQ ID NO: 4036 - DNA, 72 bp, Homo sapiens
acacctattccctggatatgacatcctggtaaaatcggactgtgtagcttccctgagcacatgattatttct

SEQ ID NO: 4037 - DNA, 72 bp, Homo sapiens
ccctccgtgagacccaccggggatcctcttccaggcgcctgatttgctggagataggcgatacaggcagacg

SEQ ID NO: 4038 - DNA, 72 bp, Homo sapiens
cgagctccataaccctgtttgttacccaatacctccgcttccccttctgaccctggcctaccacatttaaaa

SEQ ID NO: 4039 - DNA, 72 bp, Homo sapiens
attttcagatttgccactcaggtagtgatgtgtcccgcacagcgcttgtgcttgttctaactggccaagctt

SEQ ID NO: 4040 - DNA, 72 bp, Homo sapiens
gtggcccttggctgacctcttcacagggagaatgacgaaagctgagaagtgacatacctagttttaaaggaa

SEQ ID NO: 4041 - DNA, 72 bp, Homo sapiens
gaagaatttatctactatacaattcagaatgagagcgactgcttctgtctaaaagagatgggatttccccca

SEQ ID NO: 4042 - DNA, 72 bp, Homo sapiens
taaaggaagcagccaattacccagggcagatagcacggggttgattttatgttaggtcagtcagcaaatgga

SEQ ID NO: 4043 - DNA, 72 bp, Homo sapiens
taagtctcaaagtgtattgagagtattagaacactcgctgcttgcagcatacagcctcttcattctctgacc

SEQ ID NO: 4044 - DNA, 72 bp, Homo sapiens
ctctcccagctgctcctgatttcctgagctggatgcggggagctgctgctcttcctctcagcacagctgagg

SEQ ID NO: 4045 - DNA, 72 bp, Homo sapiens
tactcttagctgagaacatctgctgtttcctgaaccgagtctgttcactaccaggtccctatcccctagtat

SEQ ID NO: 4046 - DNA, 72 bp, Homo sapiens
ggctgttttagaagaatgtttttcttagatgccatcggtttaccacaccacccttgactgggaaatggggct

SEQ ID NO: 4047 - DNA, 72 bp, Homo sapiens
ccatgcctgttgttaacaaagaacagggcccaaaacgcccccaaatggctgtcttcctctccctcctgccct

SEQ ID NO: 4048 - DNA, 72 bp, Homo sapiens
agcctggctgtgtcgcccaggctggagtgttgtggcgcaatctcggctcactgcaaactttgcctcccaggt

SEQ ID NO: 4049 - DNA, 72 bp, Homo sapiens
gatgccatactgccattaagaaactgattcagactcgatctctcaacaaggtaagacatcaatgttcccatc

SEQ ID NO: 4050 - DNA, 72 bp, Homo sapiens
cagtggcaccatacatctgagtctccaattttcaccgatgatctagatacagcctgaggtatgtaggcagga

SEQ ID NO: 4051 - DNA, 72 bp, Homo sapiens
ctcaaactagtatttcagggagcagcgtgcacactcgtggttttgtggtcttcaaccgtcctgctagcccag

SEQ ID NO: 4052 - DNA, 72 bp, Homo sapiens
gtggctgcctaggctgaatcagggggtcgtgactccggtgcacagcctgcctacgcgggacgcaaaagcagg

SEQ ID NO: 4053 - DNA, 72 bp, Homo sapiens
cagcctgagccgggctgtccctgagttccctgacccggaagaagggacggccattatctttgggtgactgtc

SEQ ID NO: 4054 - DNA, 72 bp, Homo sapiens
tcctccaggaagattcttcctcacttgtcagtcagcgagactgccttggtcttaacctctgacctcagggat

SEQ ID NO: 4055 - DNA, 72 bp, Homo sapiens
cttcaccaactactcagcaccctggcaagtggtcccggagctggtggcccttgggctcccgcccattggcca

SEQ ID NO: 4056 - DNA, 72 bp, Homo sapiens
ccaggaaggccaaggagacgggatttctcagaagccgcgacgcgctcatctgccacccacacgaagacaaaa

SEQ ID NO: 4057 - DNA, 72 bp, Homo sapiens
ctcacccaggttcttcagcaagcagcagctcagaacgagcagctttgatacttgtttcctcttcctcagctt

SEQ ID NO: 4058 - DNA, 72 bp, Homo sapiens
taaggcggaaccagaatttaaagactcgtgtgacgcgagcaacctgaggctcccctgggactgggcttcccc

SEQ ID NO: 4059 - DNA, 72 bp, Homo sapiens
caggaagggccgaggcagtcgttatcctggcagcccggctctgggtcgcggcgtggccgcagggttggggtc

SEQ ID NO: 4060 - DNA, 72 bp, Homo sapiens
cagcgtccctgcgcctggagtggagcagcccctggcgtctgtgtgtagcacttgcagcccttcctggagtgc

SEQ ID NO: 4061 - DNA, 72 bp, Homo sapiens
gtggaggaatcattttgttgcataagactctgtcacgtcagaggctgaagtgacagcaactaagggaagcaa

SEQ ID NO: 4062 - DNA, 72 bp, Homo sapiens
gcaaaggtggccatgccactctcaggttcaaagcccgtgctgggacagaacctagctttcccctgcggggcg

SEQ ID NO: 4063 - DNA, 72 bp, Homo sapiens
attgctgatgagggactgcgggcgtgcacccctcacgtttcgcggttggggagagggagctcatccgaagtc

SEQ ID NO: 4064 - DNA, 72 bp, Homo sapiens
ttggtcactgatatcctcgggagttgaaattgaaccggggcctggggaaaatgaggaacaaaggtgtcccag

SEQ ID NO: 4065 - DNA, 72 bp, Homo sapiens
tgatctaccctattgactgtaggtcataagacccccgtttcaaagaagtttctgccccacacaaggcctatc

SEQ ID NO: 4066 - DNA, 72 bp, Homo sapiens
taatcagaaactggctctgcagagcccggtgtcagcgacgttttcattcccagcagcgggagcaaatggatc

SEQ ID NO: 4067 - DNA, 72 bp, Homo sapiens
aagccctgtctcctctttggtctggaaggctggggcgcttgcagcaggaggatcctggagagagaccccagc

SEQ ID NO: 4068 - DNA, 72 bp, Homo sapiens
aataggtgctaacattaaacttggagcagttaagtcggtgagctgtgtggttaccttgtcagtggagtgtga

SEQ ID NO: 4069 - DNA, 72 bp, Homo sapiens
gaggaagagtctgtctccaaaaaaaaaaagaaaaacgatagagattcttgggcccaagagtttgcattctaa

SEQ ID NO: 4070 - DNA, 72 bp, Homo sapiens
agatgattaattttgttatagtgctttcaccgcaacgcatcaaataaccattgaaacgatgatgaatgctgg

SEQ ID NO: 4071 - DNA, 72 bp, Homo sapiens
tggggaagtatctgaaggatttggaaaaaccagcccgagggttgttggggcaccctgtccatacacaaatga

SEQ ID NO: 4072 - DNA, 72 bp, Homo sapiens
cacactgtgagctagcagtgaccccaggtattatacgggatggagttcccataccgtagttcagaggcatag

SEQ ID NO: 4073 - DNA, 72 bp, Homo sapiens
ggagccagggagcgggagggggtgatctcctcccccgggccctgctgcctccagctcaccctgtcgcctgat

SEQ ID NO: 4074 - DNA, 72 bp, Homo sapiens
gcctttccggataaagaaactaagactcggccgggcgtggtggctcaggcctgtaatctcagcactttggga

SEQ ID NO: 4075 - DNA, 72 bp, Homo sapiens
ctgcctgatgaattgccagaggggaaccaccagctcggctcttaataaccggatctgcatcctgctgctgcc

SEQ ID NO: 4076 - DNA, 72 bp, Homo sapiens
cacctgcagcaaatcccatgggaacagacaggcagcgtggccatgggtgaatggagctgaggggctctgggc

SEQ ID NO: 4077 - DNA, 72 bp, Homo sapiens
gaattgcacaatttaaggtcatgcaaccatgaacacgagaaacatgggaacctctttttgttggagagggcc

SEQ ID NO: 4078 - DNA, 72 bp, Homo sapiens
ccttgtgtggagcccctgttgggtataaaggctggcggaagtggcagggggcctggagggggagctatttca

SEQ ID NO: 4079 - DNA, 72 bp, Homo sapiens
cctgaatacttgtctggcaatcaagtacactcacacgagtcttaattaacaagtgttatgccattagcaatg

SEQ ID NO: 4080 - DNA, 72 bp, Homo sapiens
tgaggtggctgtcatggcccggacggcgggggaggcgaggatggttgtggggaggcgaggatggttgtgggg

SEQ ID NO: 4081 - DNA, 72 bp, Homo sapiens
gattttttggttcttgttccctattttaattagaccgatgcctacagttattctcattttttttagcagatc

SEQ ID NO: 4082 - DNA, 72 bp, Homo sapiens
agataactgcctgcttgctctatttccagcacagacgctgcttggcaaaagggcttcctttccactccttgt

SEQ ID NO: 4083 - DNA, 72 bp, Homo sapiens
cagccacgcaaaggtaagcgctgactcagccacaacgcaggtgagccctgaagacatggcacaaaaggcaaa

SEQ ID NO: 4084 - DNA, 72 bp, Homo sapiens
ggcgacttcggcaaagggtgcgtcgccttgggcggcggttgtcagggtgaaggtgtgaaccgtctttcacag

SEQ ID NO: 4085 - DNA, 72 bp, Homo sapiens
ttacccctcactggtgccacgtggtgaggtatctgcgagctctgatgccctgtgggttgcgctggacaatgc

SEQ ID NO: 4086 - DNA, 72 bp, Homo sapiens
ggctcccacagaccgcaggctggagaatgggggtccgcggtcagctcatagcccacccgccacccagcactg

SEQ ID NO: 4087 - DNA, 72 bp, Homo sapiens
ccttctcagcgcgtaaagaatgttctggcagagcacggtggctaaagcctgtaattcttgtgctttgggagg

SEQ ID NO: 4088 - DNA, 72 bp, Homo sapiens
caaggcacacgtggtccatggacaattttatcctgcgagagacaggaaggagaacttggtgaaccgtgtcaa

SEQ ID NO: 4089 - DNA, 72 bp, Homo sapiens
agctgtataaagccttattagattcaaatactaaccgtcgctatgccatattaaaaaaaatcattatagcta

SEQ ID NO: 4090 - DNA, 72 bp, Homo sapiens
aaggcattgagtaagaaacaggctaattataacttcgagacacaagaaaaacaataagtatatgcaaatgtg

SEQ ID NO: 4091 - DNA, 72 bp, Homo sapiens
atcgttaacagacactttggttgtttccaaatcttcgcaactgtgaataatgctgcatgaacttgagagcga

SEQ ID NO: 4092 - DNA, 72 bp, Homo sapiens
ctcaccaagctggctggtattaatagacatacttacgtctgtagagaaaatgtgctggctgtagtggccagt

SEQ ID NO: 4093 - DNA, 72 bp, Homo sapiens
ttgaaggatggcctggcagagacccaagtgacaggcggtttggcctctgtccccccatggccactcccagcc

SEQ ID NO: 4094 - DNA, 72 bp, Homo sapiens
aaaattgtgtccttgttgccgtggcaacagccacacgatgtacacatggagttacacaagaaaggtcacaga

SEQ ID NO: 4095 - DNA, 72 bp, Homo sapiens
ctggcaaattccagggcaaagccagtgactcccagcggctccagtgttggtaggcggacactttgggctatc

SEQ ID NO: 4096 - DNA, 72 bp, Homo sapiens
gtaggcaagtactccaatagaagctctgccttcaccgtgagaacatgccagggttggcctgctggagggaga

SEQ ID NO: 4097 - DNA, 72 bp, Homo sapiens
aggaaacacagttgtgaggaattacaacagcctcccggccagagctggagaggtggagcccaggtcccctct

SEQ ID NO: 4098 - DNA, 72 bp, Homo sapiens
gagggactgggatgggggaaacctacaccctaggccgcttgcccgaaagccttcagtcctggagtgggactt

SEQ ID NO: 4099 - DNA, 72 bp, Homo sapiens
gacctcagtgcctgtgatgccagagtcctcgtctgcgcaacagcagctgtctgttctctcaccacgtctggt

SEQ ID NO: 4100 - DNA, 72 bp, Homo sapiens
taggggcctgcccgggggacctgctgagaacagggcgcaggcgccataagagaatgggaagggctgggccgg

SEQ ID NO: 4101 - DNA, 72 bp, Homo sapiens
cctcaacctgcagggccccaactttgagttctccacggagacccatgaggagctgctgtacaacaaggagaa

SEQ ID NO: 4102 - DNA, 72 bp, Homo sapiens
tcctccagggaggcctcagcatcagtgtctgtggacgtagtctctgaagagtgcttcagctgatggggaagg

SEQ ID NO: 4103 - DNA, 72 bp, Homo sapiens
ggttcaagggagaagtcagtggctgcccacactggcgcatccgtcatgggaactttctatgtcaaaaccctg

SEQ ID NO: 4104 - DNA, 72 bp, Homo sapiens
aggcttcagggcggcaacggctcgtcagtggggagcggggaagggatgttgtcaccatctgcctcgtgtctg

SEQ ID NO: 4105 - DNA, 72 bp, Homo sapiens
aggtctctccccagggcactgtgttggtttgtgtccgtcctggacgcggcgcgtctccagtaacgcgatgcg

SEQ ID NO: 4106 - DNA, 72 bp, Homo sapiens
cctgctttggcctcccgaagtgctgggattacaggcgtgagccaccacacctggcccctatgtcccttgtgt

SEQ ID NO: 4107 - DNA, 72 bp, Homo sapiens
acattggtgtaatttaaaggcatatatatagccgccgttgctcctctctgtaataccccaagactgtaaatc

SEQ ID NO: 4108 - DNA, 72 bp, Homo sapiens
aaatattacgtacacatctccatcacctaggaggacgtacataaatacatataaatattaattaggagcaat

SEQ ID NO: 4109 - DNA, 72 bp, Homo sapiens
acaggcacagggacccccccacagtacagggatcccgccagcacagagacctccagcacagggatgccccca

SEQ ID NO: 4110 - DNA, 72 bp, Homo sapiens
tccaagctgcgtctctgatgcggctaggggaggcgcgcgatgaaggcccccctcttctccgccttctctcta

SEQ ID NO: 4111 - DNA, 72 bp, Homo sapiens
gcacccagaatgaatttcatcatatcctggaaaaacgtttgaggaagactcgattgacaatgtcaactctgc

SEQ ID NO: 4112 - DNA, 72 bp, Homo sapiens
agtggcggctctgggattcaaactcaggctggggccgggcatggtggctcacgcctgtaatcccagcacttt

SEQ ID NO: 4113 - DNA, 72 bp, Homo sapiens
tcaggttggtttagccgagccgagtgtaatgtaatcggttgcagaggacaaagggagagttggggccaagaa

SEQ ID NO: 4114 - DNA, 72 bp, Homo sapiens
cctccatcactcccaggggcccctggcccagcagccgcagctcccaaccacaatatcctttggggtttggcc

SEQ ID NO: 4115 - DNA, 72 bp, Homo sapiens
ccccgacccctgggagcgccgacccctgggagtcccgccccgtggtccctgactgcgccccgcgcccccgca

SEQ ID NO: 4116 - DNA, 72 bp, Homo sapiens
ttctgggctggacagcctgaagacagccatctgctcgcagcaacagcagcagcagcatgcttgcttatatgc

SEQ ID NO: 4117 - DNA, 72 bp, Homo sapiens
tgctgagtgggttcacggagtgagtcaacggagggcggtgcccagtgaggctgggattgaaccagggcagga

SEQ ID NO: 4118 - DNA, 72 bp, Homo sapiens
gcctccaggggttctctcatcctggtttaagtccacggcctggtaagcacggcccgccccttctcacttcct

SEQ ID NO: 4119 - DNA, 72 bp, Homo sapiens
tggagccaataactgatcaataaagggtttaagggcggggggcggtggctcacgcctgtaatcccagcactt

SEQ ID NO: 4120 - DNA, 72 bp, Homo sapiens
agggagctgggaccagagtagagtggacactgaagcgtatgtagcagtttgccaggcgatagggaaagagac

SEQ ID NO: 4121 - DNA, 72 bp, Homo sapiens
atgagttaaaaaagccttctgcttccacactgttccgtctacattcagaaagcagtaaaaatatattgtgca

SEQ ID NO: 4122 - DNA, 72 bp, Homo sapiens
ggcttacctacccttgacctaagtcaaaaagcagacgcaataaatgggatacgcatcataataatgacagct

SEQ ID NO: 4123 - DNA, 72 bp, Homo sapiens
ctcaatctggttgagagtttcctcacttgggaaaacggaaacctagggaagctaatgtttctttgctgccat

SEQ ID NO: 4124 - DNA, 72 bp, Homo sapiens
ggttgggcagaagcctggtcacagacgctgtgccacggcacctagagaggtcataggccagttaagtgagaa

SEQ ID NO: 4125 - DNA, 72 bp, Homo sapiens
gaactgacagctgctaagagtgtatgtgactctagcggggaaagcggctcatccaaaaataatgattgccaa

SEQ ID NO: 4126 - DNA, 72 bp, Homo sapiens
aagcagaaccagaggagaagcagaccccgggcactcgcaggactatttgactcactggagaattcccttctg

SEQ ID NO: 4127 - DNA, 72 bp, Homo sapiens
cctagggcaggctcagcttcgggggctaagaccctcgtatggcgcttaatgcccctctaagggctgaagttt

SEQ ID NO: 4128 - DNA, 72 bp, Homo sapiens
gcagaaagctgacaccaaccagtttgaagacaccccgacaggaaccgaatcagcatgagaatgcagtttctt

SEQ ID NO: 4129 - DNA, 72 bp, Homo sapiens
agaaatccacgtgtccgagggcatcacttgggggccgccggtaaccattgcggggatcatgtcccggctgac

SEQ ID NO: 4130 - DNA, 72 bp, Homo sapiens
ggatcgcggcgcgctgccctcccttcctgggttcccggggctgagcttcctgggaggtccgcacacccccaa

SEQ ID NO: 4131 - DNA, 72 bp, Homo sapiens
agaccaaaggctgaaataattaccaatcaaaggaacggccaggggagcaggctctgaagctgcagcctggcc

SEQ ID NO: 4132 - DNA, 72 bp, Homo sapiens
gcttggcctctgaatgtgggaaaaattcgttcctccgcttcccatcgaattctcgtcgaaaacaactttgtg

SEQ ID NO: 4133 - DNA, 72 bp, Homo sapiens
tcacagaggaaggtggtggcaacacggagacttctcggtcacctggaacacaccccgctgtggacaccccct

SEQ ID NO: 4134 - DNA, 72 bp, Homo sapiens
tttggtatcttgaaagcaatttttttaaaaagtgacgaaataaataaagtgactaaaagtttgaagtttgaa

SEQ ID NO: 4135 - DNA, 72 bp, Homo sapiens
ccagtttgagggaagagtaaggggttaagaagtgacgggcaagaggagggagttgctggggaagggcaaaca

SEQ ID NO: 4136 - DNA, 72 bp, Homo sapiens
cctgctgagctccctccctgaaggactccctcccacgctggcttcagttcactgtgactatgtcctgactcc

SEQ ID NO: 4137 - DNA, 72 bp, Homo sapiens
tgtagaagggccagtgccttctgttcctccacccccgctagcctcagtgtacactgtaagacctattcctgc

SEQ ID NO: 4138 - DNA, 72 bp, Homo sapiens
taaataagtcacggcccatgaccttgaagagcttacggccttataaagaggttcactgtaattgtcttcacc

SEQ ID NO: 4139 - DNA, 72 bp, Homo sapiens
cagaaggggaagtaggcaccaacctattcacaaggcggcaggagagaaagcatgaaggaggaactgtcaaaa

SEQ ID NO: 4140 - DNA, 72 bp, Homo sapiens
atcagtgcatactttttgaagtgattccaagttatcgcccgcttttttcgtgtaacatataaatacatctct

SEQ ID NO: 4141 - DNA, 72 bp, Homo sapiens
tggttatgggaaacacatgtaggattcgccagctccgtggtatggtggaccctctgattaacctgaaaggaa

SEQ ID NO: 4142 - DNA, 72 bp, Homo sapiens
ggaagggtgcgttctctgttgtgcaagccacatggcgatccagtagcagaaccagaaatagaacctgaggga

SEQ ID NO: 4143 - DNA, 72 bp, Homo sapiens
gagtggttttctaactgaaaccaagcccctggcaacgtcctaatgattcaggctgggcctttctggacttta

SEQ ID NO: 4144 - DNA, 72 bp, Homo sapiens
agggactggtgattgcagctggaagtgcccatgaccgagctggcgtcctccgggggcgggtcccctgcgggg

SEQ ID NO: 4145 - DNA, 72 bp, Homo sapiens
atagaggcagaagaaaatccacatataagtggacgcgttcagttcaaaccgtgttgttcatgggtcaactgt

SEQ ID NO: 4146 - DNA, 72 bp, Homo sapiens
ggggccaggctcacctcagctgtctccagccctgtcgtcttgatgaggccctgggcttccacctcccaggat

SEQ ID NO: 4147 - DNA, 72 bp, Homo sapiens
caggaaacagagctaggcctccctgcacgcctttacgccaggcctggggaagagagaggaaaccacgtgagt

SEQ ID NO: 4148 - DNA, 72 bp, Homo sapiens
tccttctcggggacagcggcttcctgcagccctagcggggcacacatacctgactcccaaggtttcagcccc

SEQ ID NO: 4149 - DNA, 72 bp, Homo sapiens
aaagaggaaggaggcagagtaaggagaaggaagtacgaatcataaggagaggcgggtgtcagcagccatcga

SEQ ID NO: 4150 - DNA, 72 bp, Homo sapiens
ggacctgccactggggcttcgactcggccaactggcgggcctacatcctgctgagccaggattacacgggca

SEQ ID NO: 4151 - DNA, 72 bp, Homo sapiens
agccactttagcggctggggcagcttgagtttaggcgacgaattgggaagaggggaaaggatcaggttgggc

SEQ ID NO: 4152 - DNA, 72 bp, Homo sapiens
cctcacaaaacgcccaacaaaagccctgcagtccacggcccaaaggccacaagccagctattgtgacattcc

SEQ ID NO: 4153 - DNA, 72 bp, Homo sapiens
ggccctgcaggtccaactgtcaatgggtctaaccccgcccacctcaatgatctgtgagagctgagcggggga

SEQ ID NO: 4154 - DNA, 72 bp, Homo sapiens
agccaggaagatgctgcgggacaagcagtcaggggcgagcctcgcaggtgtggggcagacagaaaccccgga

SEQ ID NO: 4155 - DNA, 72 bp, Homo sapiens
agaggccatgcaacagtgggagtgggtggtggggccgggcgggcaggagcagcccactctgcgggggtgtgg

SEQ ID NO: 4156 - DNA, 72 bp, Homo sapiens
atgcttatccctgcattccactgctttgtttatttcgtgacagacccctcacaggtgagacttactcttctt

SEQ ID NO: 4157 - DNA, 72 bp, Homo sapiens
agacacttcagtcctgcaggggcatcggggtgatacatcactgcatcttggtctcctggcaagccagcagta

SEQ ID NO: 4158 - DNA, 72 bp, Homo sapiens
tggtatagtggaatgtcatgcaaaacatgagcccacgactcaaagcatgtgaagcagaccacgctggggacc

SEQ ID NO: 4159 - DNA, 72 bp, Homo sapiens
ttctttttcaccccagccccagagctccagcatggcgctgtctgctcctccgctggttcccgcctaagagca

SEQ ID NO: 4160 - DNA, 72 bp, Homo sapiens
ctgggcctccaatgactccctaccgcctctgcccacgtggcccctgtggttacaactgtggccctccctgac

SEQ ID NO: 4161 - DNA, 72 bp, Homo sapiens
tattaagaacgtgatctgttaaacaccggagactccgccaaggagcaccagcatggtgggagcaggggcaca

SEQ ID NO: 4162 - DNA, 72 bp, Homo sapiens
cacagctggtccttatcagggcggggctgggcatccgcccagacccaggggacttcctggctcagtgccaca

SEQ ID NO: 4163 - DNA, 72 bp, Homo sapiens
tgtgaggcaggtcgcggccctactgcctcaggagacgatgcgcagctcatttgcttaaatttgcagctgacg

SEQ ID NO: 4164 - DNA, 72 bp, Homo sapiens
gatgagcgctgctgagaagggcgtgacaaacatgacgtacaagtgcagaattaacacactaatgagtgagcc

SEQ ID NO: 4165 - DNA, 72 bp, Homo sapiens
caaaactgactgcgaagcttcagtgtcctgaacagcgtggaacgggcaccaggactgtcatgcagtcactaa

SEQ ID NO: 4166 - DNA, 72 bp, Homo sapiens
ttggggatggctcaccctgagtcatttctgccatccggccttcctctgttggcaaaagtcccagcccaagga

SEQ ID NO: 4167 - DNA, 72 bp, Homo sapiens
ctgtccgtcgccggcctctccaagtgcagggcctgcgaagacccgcgcgtagccccggttcccgcccgcgcc

SEQ ID NO: 4168 - DNA, 72 bp, Homo sapiens
gggtccatgggcagatgccaggaaacactgagtcacggtgagggttttcccttctgttatctttctatcctt

SEQ ID NO: 4169 - DNA, 72 bp, Homo sapiens
gcttgcctggctctttcagccctctgagcagtatacgggaatttctgtcagcatttttagtgtgtgtgttcc

SEQ ID NO: 4170 - DNA, 72 bp, Homo sapiens
aatcacccccagccagttagacaggaagccattagcgagaggacaggacagtgactaaggggaaaactgacc

SEQ ID NO: 4171 - DNA, 72 bp, Homo sapiens
cattcattctttcaggtgtgatggggataaagcagcgagaagcccccaagggtttgtgagagcccttgagta

SEQ ID NO: 4172 - DNA, 72 bp, Homo sapiens
acatcccatcagccagtgctccccagctgcttccccggaatgcctggctgaaccccaacaaggccagcccct

SEQ ID NO: 4173 - DNA, 72 bp, Homo sapiens
cacagcctaaattcaaacactgcttcactcgggctcgtgcttataaccttacctaggtgtcttaaatgccac

SEQ ID NO: 4174 - DNA, 72 bp, Homo sapiens
tttgtgaaatgatttcagaggcctggaatgtgcaacgctctatagaaaaccaaatgccactcttttctagtt

SEQ ID NO: 4175 - DNA, 72 bp, Homo sapiens
ttttgaggggatttctgtttcaactccatgcttcacgtgttcatgcaaatccaaacctctattattgttagg

SEQ ID NO: 4176 - DNA, 72 bp, Homo sapiens
ttcgctcttccccagggtgcccattctccttatcccgcaaagcaaagtcctctactcctgggtctagttccg

SEQ ID NO: 4177 - DNA, 72 bp, Homo sapiens
ccacagacttgtgggctccacccttgaattcctgacgccctaggtctgggatggggcttgacaatttgcatt

SEQ ID NO: 4178 - DNA, 72 bp, Homo sapiens
aaacctatgctactgaggccacaccactgacttcccgtaacttacttcttctccctatccttcccgcccagg

SEQ ID NO: 4179 - DNA, 72 bp, Homo sapiens
ggcagagagagtgcagcgccgcggccagcagccaacggggccgccagcaatgtggtttcaatctaattgtcc

SEQ ID NO: 4180 - DNA, 72 bp, Homo sapiens
ttacgtaagaaatgttagtcaccagtgtgatgaaacgtagaatgaaaccttaaactgtgttaatagaaatgt

SEQ ID NO: 4181 - DNA, 72 bp, Homo sapiens
attctaccattaacagcaagtacagcttagttcctcgagaaaaatgagaactacccagagttcatgtcaaca

SEQ ID NO: 4182 - DNA, 72 bp, Homo sapiens
gtccccagcggggcatttaaagacttaatgtgggccgggcgcggtggctcaggcctgtcatcccagcacttt

SEQ ID NO: 4183 - DNA, 72 bp, Homo sapiens
tcagatggctctttgagacagaaataagacagggacgtggtctctgcttgtagtgtgggacgtctcagctgc

SEQ ID NO: 4184 - DNA, 72 bp, Homo sapiens
gctacccacccaactgcctctcccgtcacccgggacgggtcagctcagtcaccatgttccctggagaacaag

SEQ ID NO: 4185 - DNA, 72 bp, Homo sapiens
gttgcccaggttggtctcacactcctcagctcaagcgatcatctcactttggcctcccaaagtgctaggatt

SEQ ID NO: 4186 - DNA, 72 bp, Homo sapiens
ttcctgtcctgagctgctcttactcgctctcgggacggtcatgccaaggaagtcccctgtccacagccggga

SEQ ID NO: 4187 - DNA, 72 bp, Homo sapiens
ctcacagtcacggcagaaggccaagggggagcacgcgcgtcacgtggctggagcaggaggaagagagcaaag

SEQ ID NO: 4188 - DNA, 72 bp, Homo sapiens
ccccctggggtacagctgcccacgcaccatcttatcggaaatcccagggaatggagcccaaggcttatgcac

SEQ ID NO: 4189 - DNA, 72 bp, Homo sapiens
ctacccgccgggtctttcccgtttgtcaggcaggccggcaggctgggctggtgactcatgactggctgggcc

SEQ ID NO: 4190 - DNA, 72 bp, Homo sapiens
ttcatcaacttctcggtggaaaaataaccacttaacgttggtatcacactggaaagtactttaatacccctg

SEQ ID NO: 4191 - DNA, 72 bp, Homo sapiens
aagccatgagacaaaacagacttataaacatgtaacgtgttgtgttgacacaaggaaccaagcagtgatgag

SEQ ID NO: 4192 - DNA, 72 bp, Homo sapiens
ctccgattttaagggaacggggacatgcggagccacgtgagtcactgggtcccagagccacggaaggctctc

SEQ ID NO: 4193 - DNA, 72 bp, Homo sapiens
agttgaaaaggaaaacagaatcaaggagaggatttcgcaagtgagagacaattaaacttgtctgagtgctga

SEQ ID NO: 4194 - DNA, 72 bp, Homo sapiens
ccggctcggagagcaccacgggcttcctctggcctcgggaaaacatgactttcaaaaattgagtctccactt

SEQ ID NO: 4195 - DNA, 72 bp, Homo sapiens
gtgggacctgcccatctgctgggccacgtatagcacggctgccccacccctccccggcattgcagtggggct

SEQ ID NO: 4196 - DNA, 72 bp, Homo sapiens
gaccctgagggtaaagatgcggcacttgagccctccgcttgcctcccaggccacctttgctgcttgactttg

SEQ ID NO: 4197 - DNA, 72 bp, Homo sapiens
ctctgttggggaaaaggcaaggcctccacaggaggcggatatggtctgcaggctattgccgagatgcctctt

SEQ ID NO: 4198 - DNA, 72 bp, Homo sapiens
accagcttcctggctcctcttcctattggatggagcgctcctccccagacaacccagaacactgctgcactc

SEQ ID NO: 4199 - DNA, 72 bp, Homo sapiens
caggtgctgactcacttggctacaggtatggcaatcggcttgctctttcatctgggtgagatgcaaatccca

SEQ ID NO: 4200 - DNA, 72 bp, Homo sapiens
gctgacggcttcactggggatacaggattgccacacgcgaaaccgttagataacaggagaagatagcgcagg

SEQ ID NO: 4201 - DNA, 72 bp, Homo sapiens
gggggtgctctcggctgccatggcaacggaggggccgcccgcttccccgcggggcgaggccggctctcccag

SEQ ID NO: 4202 - DNA, 72 bp, Homo sapiens
acttggacgtcacatgtgaagcctacgatcacttccgctcctgcctgcacgcgctggagcagctcgcagatg

SEQ ID NO: 4203 - DNA, 72 bp, Homo sapiens
ggaatgattaaattggtgcaaaagactagggtaagcggcagagatttaggagattaagtcctgccagggtgt

SEQ ID NO: 4204 - DNA, 72 bp, Homo sapiens
accatccccagtgctccttgtcacattctgagccccgtagaccgggtcctgtcggctgaatcatgagtgtaa

SEQ ID NO: 4205 - DNA, 72 bp, Homo sapiens
agggcacagcgagggcagctccccactggggctaacgcagtgttgccacacagcacccctgtggcctcagca

SEQ ID NO: 4206 - DNA, 72 bp, Homo sapiens
aggaatccacaggaggtggggaccgggaaggcagccgggttgcgccagtgcctgcaagggaacctctggccc

SEQ ID NO: 4207 - DNA, 72 bp, Homo sapiens
gacccacaatttagctagattaatccccacttccccgctactcccacctccttcctggcttcactcccttgc

SEQ ID NO: 4208 - DNA, 72 bp, Homo sapiens
cttttttccctcccgccccggcatctgttctcgcccgaagaagctggtccttagcctgcgctgcggagcaac

SEQ ID NO: 4209 - DNA, 72 bp, Homo sapiens
cccgggaacatgcccagaagtgccagcagcagcagcgagaagcagagggatcccgtcgacccccacgtgctg

SEQ ID NO: 4210 - DNA, 72 bp, Homo sapiens
aaggagaagctctcagaaaagcacagagcatgcatcgtcaaatctaaaaaactgtcaaagggtaatgaatta

SEQ ID NO: 4211 - DNA, 72 bp, Homo sapiens
tctgctctataaacaagcttgtcacactacataaacgtggcatgtcaagggattgaaagtctgctctaaata

SEQ ID NO: 4212 - DNA, 72 bp, Homo sapiens
tggagttatttttaaagaggagaggtgaggcttgccgtgcaaagctggaaagagggcgtttgtttgcagagc

SEQ ID NO: 4213 - DNA, 72 bp, Homo sapiens
ctgagggggttcatctgtggtcctgccctggctctcgccccagccccaccccttccccagctctccatttct

SEQ ID NO: 4214 - DNA, 72 bp, Homo sapiens
acaaccagctggatcagttctcacaggagctacagcgcggagactgggtaagtcaacgatccccagagctgg

SEQ ID NO: 4215 - DNA, 72 bp, Homo sapiens
catgccatttatgtctcaatacttaaagttacaaacgaagctaacaaactgctaaataaccaccttcataat

SEQ ID NO: 4216 - DNA, 72 bp, Homo sapiens
gacacagacagggagcaggcatggcacctgcgccacgcagagcagcaaggctgagcatgaccactggaaata

SEQ ID NO: 4217 - DNA, 72 bp, Homo sapiens
gggatgtggctgtgttctgaacggcagagcccgtgcgctgtccagggcagcgacacagggcgggcgttaagg

SEQ ID NO: 4218 - DNA, 72 bp, Homo sapiens
tttcctaaaacagaacatccttcttcctcagctaccgctaacctttatttagaacagaataaatcactggac

SEQ ID NO: 4219 - DNA, 72 bp, Homo sapiens
caaaattgaaacctacattgcaaaacctgctctgccgggaacctccacaaatagtaatgttgcacccctttg

SEQ ID NO: 4220 - DNA, 72 bp, Homo sapiens
gaaacaggggtttgcaattttaagcaatgcagcaccgtcttcaaatgcaggtcgcaggcacccacaaacaga

SEQ ID NO: 4221 - DNA, 72 bp, Homo sapiens
aagacggatgtccgggaaggcaagagcacaccaggcggagggaagaatatctgcagagaccctgaggatgag

SEQ ID NO: 4222 - DNA, 72 bp, Homo sapiens
tgagttccctttcttggctgggccccagtctgccacgtcagtgctgaaaatggacattgctgctgcctcggt

SEQ ID NO: 4223 - DNA, 72 bp, Homo sapiens
gctttcgggcagggcggggccagggcaggctggggcgagggctcctgctggtactgtgttcgctgctgcaca

SEQ ID NO: 4224 - DNA, 72 bp, Homo sapiens
gtgcctgtgtgtctcaccccatcgccatcatgggccgtgaaatgtcctaatcaacaagtaagaggaactgca

SEQ ID NO: 4225 - DNA, 72 bp, Homo sapiens
ccaggacaaaggccgctttgaactctaccgtgccacgtacgtaagggccatggtggggaagggcccagtgtg

SEQ ID NO: 4226 - DNA, 72 bp, Homo sapiens
tgccactggcagagctatgcactccttggggaacacgtgggtggcagcagcgtcacctgacccaggtcagtg

SEQ ID NO: 4227 - DNA, 72 bp, Homo sapiens
catctgtaaaagacagccatgcaaagtgggagatccgctaggcttccagatcgaagtcatcgcgctcctcat

SEQ ID NO: 4228 - DNA, 72 bp, Homo sapiens
tcaaacaggatgtgggcagaggcctccccttgcttcggtaataaagtagatggatggctgatagggagggcc

SEQ ID NO: 4229 - DNA, 72 bp, Homo sapiens
tcccactaccccgcccccgtgggctgcaccaaaggcgagtgtagaattaaacactgatactgaaatagggag

SEQ ID NO: 4230 - DNA, 72 bp, Homo sapiens
tccggcagcaacacctgtctttagcatgcaaacatcggtctcatagagtcttccctgaaagatgtttaatga

SEQ ID NO: 4231 - DNA, 72 bp, Homo sapiens
tcttctgtgcccatggtcatttcagaaggaacttacggttccttgaagcagaaagtaaatttgcatttcata

SEQ ID NO: 4232 - DNA, 72 bp, Homo sapiens
gccctctagctggctgtgcaggtcctatagactcccggagcctctgtttcctcatccctccatcccaacgag

SEQ ID NO: 4233 - DNA, 72 bp, Homo sapiens
ggcatctggcgacatcggcagaaaggctctctgcccggtagacggtgaacaaaacccacaaaaccagccagc

SEQ ID NO: 4234 - DNA, 72 bp, Homo sapiens
gagtggtctgaatgaaaagactggcatctatctcccggagagtggggctgtgctcattcctgttgcccaact

SEQ ID NO: 4235 - DNA, 72 bp, Homo sapiens
gttgggataccggcgggcaacgctgttccaatccacgtcctccagccgaaagccctggccaggaagcaagag

SEQ ID NO: 4236 - DNA, 72 bp, Homo sapiens
acccaaaaaggacttcagaggcagtggccctggctcgggctaccagaccatcttgggaagccctgccacctc

SEQ ID NO: 4237 - DNA, 72 bp, Homo sapiens
tttacaggcactgctaggctgctcagaggttctctcgctgactcaccctctgaggtgaggaacactgccctc

SEQ ID NO: 4238 - DNA, 72 bp, Homo sapiens
cactgggctgtctagtaaaaatcagctagacaagtcgcctaactgccgttctcttgtgtttacaagttctga

SEQ ID NO: 4239 - DNA, 72 bp, Homo sapiens
ctccttactagcttttgaaatctgcattgcacaggcgaatatcatgggcatggggtttggcaacccgggggt

SEQ ID NO: 4240 - DNA, 72 bp, Homo sapiens
tgggtttctgaacttcttttaatacctaaccctttcgaagtcaccagccagtaaaaaccactgcaaagaagg

SEQ ID NO: 4241 - DNA, 72 bp, Homo sapiens
aaatcccaggttcctcttggatacagcattttaatcgtcaacacccaaatcttgtgatagaaaagggcgggc

SEQ ID NO: 4242 - DNA, 72 bp, Homo sapiens
caggcaagattctgtctcaaaaagaatgcagtagccgagctggttatgcacacatcctggaatctttgagaa

SEQ ID NO: 4243 - DNA, 72 bp, Homo sapiens
ggacttgaaacaaaggccaagctcctcctgttccccgctgccccctacacctccagaagagaggctgcagcc

SEQ ID NO: 4244 - DNA, 72 bp, Homo sapiens
cgactcaggaatgtttccctgaaggacctgggcaccgcctctttgagatgtaaattcgaaggaaaacagcgc

SEQ ID NO: 4245 - DNA, 72 bp, Homo sapiens
caaatggggcgctgcaagagcaagggggatggcctcggcgctccccgcccggcccactgctcatctgggggc

SEQ ID NO: 4246 - DNA, 72 bp, Homo sapiens
catccagccgactcatggccaaactccggttttcccgaaggcgccgggccaacacaggatctgatagtgcag

SEQ ID NO: 4247 - DNA, 72 bp, Homo sapiens
ctattaagcaatggagctgggaggagctaggaacccggttctaaccactgtaatacccgtccacggtggaag

SEQ ID NO: 4248 - DNA, 72 bp, Homo sapiens
tggcccagactgcagctgaatctccggtccactgccgactgactcactttgtaatgtttcgcaagtctcttc

SEQ ID NO: 4249 - DNA, 72 bp, Homo sapiens
caaccgaatgtggacactcggcagaagcagctggccgcctggtgctcgctggtcctgtccttctgccgcctg

SEQ ID NO: 4250 - DNA, 72 bp, Homo sapiens
gttccttcgttagttcctcgcatggcttgttccctcgcttccctcttttgagtcttgactcaagtcacctcc

SEQ ID NO: 4251 - DNA, 72 bp, Homo sapiens
ggaaatgctagcgactgagccttgacagctgagcacgggttgcctcatccctctcatgctgtctatttctta

SEQ ID NO: 4252 - DNA, 72 bp, Homo sapiens
ttctgagagcaggatacatatgtacacacacctgtcgtcgggtggacacagaggtgaacccacagacattca

SEQ ID NO: 4253 - DNA, 72 bp, Homo sapiens
tgagttactgagggcctcagtccattcagagcaggcgaggaggaggaagtgagtcagtgggcacagcgattc

SEQ ID NO: 4254 - DNA, 72 bp, Homo sapiens
acaaggactgcctgattgacaagcggcagcggaaccggtgccagtactgccgctaccagaagtgcctggcca

SEQ ID NO: 4255 - DNA, 72 bp, Homo sapiens
gcaagagacgggtgctaacagcgtccgagccaatccgtaagcatcagagggacaaagaaatcataaacaaga

SEQ ID NO: 4256 - DNA, 72 bp, Homo sapiens
gcagaagccgatggtatgaaaggtgcggcacagctcggtcttgtacttcggatggcgagtcaggctgcgcag

SEQ ID NO: 4257 - DNA, 72 bp, Homo sapiens
ttcctttttaggcgctccagagtccatttctcctgcgcagaccagccctcttgcgcattcaacaaaaccacg

SEQ ID NO: 4258 - DNA, 72 bp, Homo sapiens
ctgatgttatcagtatactaaaagtggacatagaacgttaaagaaggaaccaaagaggcaaagatacctgga

SEQ ID NO: 4259 - DNA, 72 bp, Homo sapiens
tggcattgaaactctcgattatttatccactcaggcgcatctatacaatgagaaacaactgccttgaaaggc

SEQ ID NO: 4260 - DNA, 72 bp, Homo sapiens
cccaaacccgctttgtccattaaacaatcgggaaacggagaaaaatatttgcagacacaatgtggtctgagg

SEQ ID NO: 4261 - DNA, 72 bp, Homo sapiens
ccagaattctgttgggtggtttgttacctctagcacgctccatgcccttcttgcccctttcctttcagacaa

SEQ ID NO: 4262 - DNA, 72 bp, Homo sapiens
tccactgccagcagtagttccccatttctatttctcgttaggtctcaactcttccgtcatgagttctatgtt

SEQ ID NO: 4263 - DNA, 72 bp, Homo sapiens
ggttgaagcaattctgtggctgctattagggaatccgtagactgttcatggaagagtggaaggtgggcttta

SEQ ID NO: 4264 - DNA, 72 bp, Homo sapiens
tgaactgtggatggaggctgctttgtccttttccccgtccagatccatgcccatagacaccgctgactatag

SEQ ID NO: 4265 - DNA, 72 bp, Homo sapiens
caaaccaagctatgagtgaaaactgacacatgcaccgatgacatatacatttcccttaaagtctcttccttc

SEQ ID NO: 4266 - DNA, 72 bp, Homo sapiens
agactcatcttgtaatgtttgtaatgtccatgtatcgtgtatgcacacatttttttctgacctattagaagc

SEQ ID NO: 4267 - DNA, 72 bp, Homo sapiens
gagaaggagtggcccatatgtgcagccgcgcctggcgcaggaggcttccagggccggctccctgcactgaag

SEQ ID NO: 4268 - DNA, 72 bp, Homo sapiens
ctatagaccctgttaggtactttaaaagagtgtctcgtttctcagtactctattcttcccaaattcaaactg

SEQ ID NO: 4269 - DNA, 72 bp, Homo sapiens
accgaccacacctgctggccacgcctactgctaaacgcagcccaaacagtgactcagcttccaccaatccaa

SEQ ID NO: 4270 - DNA, 72 bp, Homo sapiens
cagggtctgaggctctttttccttctcacatctctcgtttccttctctggcctcttctgggtttggttctca

SEQ ID NO: 4271 - DNA, 72 bp, Homo sapiens
ggacatctgtcccacagaatccttatacgccactacgaaaaagtgacgcacgtcaaaaaaaaccgctgagca

SEQ ID NO: 4272 - DNA, 72 bp, Homo sapiens
ctctctctcatactcttggatttgtcagtcatcatcggaggaactagccaagtaaaacatgcaacacacaca

SEQ ID NO: 4273 - DNA, 72 bp, Homo sapiens
atgtgagagggccattcctttggtggtgatcacatcgctcagcaatgcaagtcatcctatttgtcaagagtc

SEQ ID NO: 4274 - DNA, 72 bp, Homo sapiens
cctcctcccacgctgggcctgtctgcccgatcccgcgaagaatctcccaagagttcacgcacccgcctcccc

SEQ ID NO: 4275 - DNA, 72 bp, Homo sapiens
gcttatctgatctgaaggacaggccccagggcttgcgttgttttttcgtcattgccaggcacctttgctgag

SEQ ID NO: 4276 - DNA, 72 bp, Homo sapiens
tcacgcttcgcccgtgtcctcctcacccgctcctgcgccatcctgcccaccgtgctcgtggctgtcttccgg

SEQ ID NO: 4277 - DNA, 72 bp, Homo sapiens
ttcctcctccagccggttctccccagcactctcgtcgtcgtcctcccggaggctccgggatatgctgtcaga

SEQ ID NO: 4278 - DNA, 72 bp, Homo sapiens
cttgccagactcacatccgtgcagtttaaccacttcgttttccagaaaatcacattctgaattccgtgaaat

SEQ ID NO: 4279 - DNA, 72 bp, Homo sapiens
tcacctgtatttgctgtgaagattaaccacaaacacgatcaggtcaattcggggccgattcacactggaggg

SEQ ID NO: 4280 - DNA, 72 bp, Homo sapiens
attcacagagaaacgtgcagagtgaatcctttaaacgagaaacaagacctgtgcttggtgaatcaggaaaaa

SEQ ID NO: 4281 - DNA, 72 bp, Homo sapiens
cctttggcctcttaacccacatactgggtgagtgccgagggcggtgaggggtgcacgtgacttctcagagat

SEQ ID NO: 4282 - DNA, 72 bp, Homo sapiens
gtgtggagaggaggggccgggccgagagcaaataccgcctttttggtgcagcagcagccctgtctctgaccc

SEQ ID NO: 4283 - DNA, 72 bp, Homo sapiens
ggtgggcgtgggcttggcaggccccgcacagggagcggcgggccggccccgccgcccggggcaatgaggggc

SEQ ID NO: 4284 - DNA, 72 bp, Homo sapiens
gtgaaccacagggctggcccaggattcttagatgtcggaggaggcgaagatgccacgtccagcagaaagagc

SEQ ID NO: 4285 - DNA, 72 bp, Homo sapiens
agctttgcaataagggtgggatggtttcagctttgcgatgagggtgggatggtttcaggaccatactttttg

SEQ ID NO: 4286 - DNA, 72 bp, Homo sapiens
gagaaaactggggcccagagatgctgagttgcctacgcacagtcacagagctggaaagtcagaaagtcagga

SEQ ID NO: 4287 - DNA, 72 bp, Homo sapiens
agatctggatctgagatactgttcccgcccctccgcgagtaatgcgcccttgggctgagacccgagctcagt

SEQ ID NO: 4288 - DNA, 72 bp, Homo sapiens
gccccgatacggtcgccatgcccaagagaggaaagcgactcaagttctgggcccacgacgcctgctctggac

SEQ ID NO: 4289 - DNA, 72 bp, Homo sapiens
acaaaatacttacaattgtaggtctctgtccctgtcggtaccaagaacagagagtcttaattgtctgcacca

SEQ ID NO: 4290 - DNA, 72 bp, Homo sapiens
gttccttttgtccccttccgagtggcagggcagcccggcccgggctgctggcgatgactcaggcctggccct

SEQ ID NO: 4291 - DNA, 72 bp, Homo sapiens
tgtcttcgctcagtacctcatgtacactggggtgtcgttctctgggacccgtgcccgacctggacgatgtga

SEQ ID NO: 4292 - DNA, 72 bp, Homo sapiens
cactcccagtaaaccagggttcacacctctcctgccgctctgcctcagactctgccttcgctctatgtattt

SEQ ID NO: 4293 - DNA, 72 bp, Homo sapiens
cttctcttcctttcagagactggcctatggcatcacgccagagaacgagcaccacctggtggctcagaggga

SEQ ID NO: 4294 - DNA, 72 bp, Homo sapiens
cttcttggcggcgtgcagctgggaggtcaggtaggcgatggtgctggcccgctgctccagctcgctagacag

SEQ ID NO: 4295 - DNA, 72 bp, Homo sapiens
ccccgagggtgcgcgcgcgtgggtatgagtgcgtgcgtgtgcctgggtgtgcgtgtgtgtaagtgtgcacgt

SEQ ID NO: 4296 - DNA, 72 bp, Homo sapiens
cgatgggggcccgccctgctgccacagtagaaacccgcacccacctcggggagcgctggaagcgctgcagcc

SEQ ID NO: 4297 - DNA, 72 bp, Homo sapiens
ttgggtaccaaggaggactgcctggaggtggtggccgcggtgactgctccaaacccgttcggccctgtgcag

SEQ ID NO: 4298 - DNA, 72 bp, Homo sapiens
aaccccactcgcctcaaggtcggtggaggcgggggcggggagggtgtctggaagtggatgcctgcctcacct

SEQ ID NO: 4299 - DNA, 72 bp, Homo sapiens
gaggagaagccagggcctgtgggagagcccaggaccgtggccacagccctgcagggtccccagctcctctgc

SEQ ID NO: 4300 - DNA, 72 bp, Homo sapiens
catctgtaagatcattgccaagaattgctagggcacggagtcagagcatcagaacatttgggccactcctca

SEQ ID NO: 4301 - DNA, 72 bp, Homo sapiens
gtagttttgaactttgatgtgaggaaattctcctgcgtggctgctcctgcactgcatggctctgagcatctg

SEQ ID NO: 4302 - DNA, 72 bp, Homo sapiens
atgcttgcagcatcaagttcctcaggagtttctgtcggcccagctcatagtcctcctcgtctacatttacca

SEQ ID NO: 4303 - DNA, 72 bp, Homo sapiens
gaggtcctgaactggtgcccttttataaacgctgacgctggggaattttctttttttcttctttaaaaatcc

SEQ ID NO: 4304 - DNA, 72 bp, Homo sapiens
aaggagggcttgccccagtggcgggaaaacaaaaacgaatagagcagcttcttcagagctgcagacgtgggg

SEQ ID NO: 4305 - DNA, 72 bp, Homo sapiens
atgatcagaaatgatgtaatggccacaggcggctccgcctgcgtcatccatgatttcatcacacacctcggg

SEQ ID NO: 4306 - DNA, 72 bp, Homo sapiens
tgaagaaaggacattggaattgggttttctgtctgcgatgggaatgtttagtcagatatttagagagctttt

SEQ ID NO: 4307 - DNA, 72 bp, Homo sapiens
atgtaggtggaactatatcatatgtagcccacaaccgagggtgcctgacttcaccagctttcgtggttttac

SEQ ID NO: 4308 - DNA, 72 bp, Homo sapiens
aggagttccttggattctttccttctctgttttcacggcccgcatgccaggttaggccctcctcatcttatg

SEQ ID NO: 4309 - DNA, 72 bp, Homo sapiens
gctctgattattgcagcaaggttatgcaactgctgcgtggggcaggcaggacagctgtcccgagcccttgcc

SEQ ID NO: 4310 - DNA, 72 bp, Homo sapiens
agaagaatttggtcctgccagttcagtaaacaccccggcctttcttattgccgtgcagcagacttacatgaa

SEQ ID NO: 4311 - DNA, 72 bp, Homo sapiens
aatgggttacaaaggcaatgagatattgactccttcggtccttagggtggccggaaacctcatgatggtcag

SEQ ID NO: 4312 - DNA, 72 bp, Homo sapiens
tcaaatgacttgagtatttctaaaaatctgctctccgaggaggaagatttgctatcactgatgatgtcattt

SEQ ID NO: 4313 - DNA, 72 bp, Homo sapiens
gggaagtggtagcacgtggtgactgagagcttccccgatccttttagatcaaagaacacttctatgcctttg

SEQ ID NO: 4314 - DNA, 72 bp, Homo sapiens
gccccgccgggggatgactcggcatgaggcactgccgggaccacgcaactggtcggcagcccctggagccaa

SEQ ID NO: 4315 - DNA, 72 bp, Homo sapiens
gaaaaaatgcaggcgcctccctggataccgagccccgtcgtttctgtttgtcagtctgctttttggcattga

SEQ ID NO: 4316 - DNA, 72 bp, Homo sapiens
gcatctggagggccggtggcgcgggaatttgaaaccgttgcgacagacccgttaggcgattcctgtggggga

SEQ ID NO: 4317 - DNA, 72 bp, Homo sapiens
aagtgctgcgaggtttacaaccagctgcagtggttcgatgggaaggatctttctccaagtggttcctcttga

SEQ ID NO: 4318 - DNA, 72 bp, Homo sapiens
aaccttccttcatctctgtttcctcatctgtagaacggagataagatttgctccctttctacctcaccagga

SEQ ID NO: 4319 - DNA, 72 bp, Homo sapiens
ttgatacttagctgtggataatatgccaggagaaacgtacatatgggcaagtgttttagtgaaaatgaggag

SEQ ID NO: 4320 - DNA, 72 bp, Homo sapiens
actctttgttggggaaaatgccagtcaaccttacccgtcagaacgctgcctttaagatcagagatctctttc

SEQ ID NO: 4321 - DNA, 72 bp, Homo sapiens
ctttcatgactcagcacagaggaagaagccgagcgcgattctccaacacactggggtacgtactggctggcc

SEQ ID NO: 4322 - DNA, 72 bp, Homo sapiens
gctacctgtgctgctagccaagacctgcctgcacccgcctgggggaagaagagggggcagagtccagagggt

SEQ ID NO: 4323 - DNA, 72 bp, Homo sapiens
ggagccggaaccggagcccgagcccgagcccgagccggagcagctctgacctggagctgaggcagccagcag

SEQ ID NO: 4324 - DNA, 72 bp, Homo sapiens
agctgtggccactcagccaatatctgcacaggtggcggttgcccggtcaagggcgggctcacaatctgcggg

SEQ ID NO: 4325 - DNA, 72 bp, Homo sapiens
gagttgagcatggggaagctgggctgccaaatgaccggggagtgggtgggcaggggtgccgggtgggagagg

SEQ ID NO: 4326 - DNA, 72 bp, Homo sapiens
agggtatgtttttatctactgtgaggttcctggggcggagatgtgcagtggagcgagaacttcctgtgaccg

SEQ ID NO: 4327 - DNA, 72 bp, Homo sapiens
aaaggcaattacattgtccttttaattcttgggaacggatgtgtttgggcaatattaacaggttttgtgttt

SEQ ID NO: 4328 - DNA, 72 bp, Homo sapiens
ccagggtgtctccgggctccaactgatgctccaggcgtctttccctcactggggagcaggccgattgcacca

SEQ ID NO: 4329 - DNA, 72 bp, Homo sapiens
aaacacaaagtgaaaccaccaccaccatttaccagcgtcactcctaagcctggactgtggctctgtgctctt

SEQ ID NO: 4330 - DNA, 72 bp, Homo sapiens
cccactggggtgcttaggaggagcagcgtgaacaccgggaaaagagcatctggagagacctagatagtaggc

SEQ ID NO: 4331 - DNA, 72 bp, Homo sapiens
gtgtaacccaatactcactgctcccctcttcattacgtattctgtgcattgcccatagaccaggcagatgga

SEQ ID NO: 4332 - DNA, 72 bp, Homo sapiens
cctcttgccgggagacagcctgggagtatgtcaggcgcaggaggaagcacaggccccggcctggatgcccag

SEQ ID NO: 4333 - DNA, 72 bp, Homo sapiens
ctcacggctgaccctgctgggtcgtcctgccagctcggacacttgtttgttgtggcttttgtaaaatactct

SEQ ID NO: 4334 - DNA, 72 bp, Homo sapiens
ctgtgccaccaatgaacaccaagaatgacctggaccgacagccccacaccccacaggctggggaacttcttt

SEQ ID NO: 4335 - DNA, 72 bp, Homo sapiens
aaataccttcccgtaaaggtctgacgaaatcttctcgcaggagccggaagtgggtatccagatagatagcag

SEQ ID NO: 4336 - DNA, 72 bp, Homo sapiens
tacccaggcactgggtgttggcgggagcagtaaagcgccataaaagcaccacttggatgactattgcaaagt

SEQ ID NO: 4337 - DNA, 72 bp, Homo sapiens
cgtttaaaacgaggcctctaggaggttcctggcagcgttacagtgatctcagccacccccatgctggctggg

SEQ ID NO: 4338 - DNA, 72 bp, Homo sapiens
tgaaggcgcgtgtctcaagggagccgcaaggcccccgtgaagaggaatccccttttcctcctgagctgtggc

SEQ ID NO: 4339 - DNA, 72 bp, Homo sapiens
gtaccacctccccttcctctgacctaatgagggctcgagttggaaaccacaaaccctcgttggccccacagg

SEQ ID NO: 4340 - DNA, 72 bp, Homo sapiens
tcttggttaccataaatctcagaatgatgctttttcgatacttatgcaattcctattgcccaatttgaaaat

SEQ ID NO: 4341 - DNA, 72 bp, Homo sapiens
ttggtgaagatcttaacaccacgccttgagcaagtcgcaagagcgggaggacacagaccaggaaccgagaag

SEQ ID NO: 4342 - DNA, 72 bp, Homo sapiens
ggccacagatgctaagttccttaaatctggtctagcgataagagtgagggcaggagaaagtggcactgatac

SEQ ID NO: 4343 - DNA, 72 bp, Homo sapiens
cacaccggtgagaagccctacaagtgcagcgagtgcggcagagccttcagccagaaccactgtctcattaaa

SEQ ID NO: 4344 - DNA, 72 bp, Homo sapiens
ctcatggggctgtggtttttatggcttagacttttcgggagaaactgggcaccttctcgttgacttgaagcc

SEQ ID NO: 4345 - DNA, 72 bp, Homo sapiens
ttattttttaatctgcccttgctccctctctgggccgctcggcctccggcctcggtttcggcgtttttctcc

SEQ ID NO: 4346 - DNA, 72 bp, Homo sapiens
atgggtgctgggctgcgggagtcggccctggacctcgggaagttgtggaacggggcgcaaaactgtgcttgt

SEQ ID NO: 4347 - DNA, 72 bp, Homo sapiens
agcacgtgtgtggggaggaaggcgggttctggccccgttccttccgcagcagctccggcctggcgggttctg

SEQ ID NO: 4348 - DNA, 72 bp, Homo sapiens
cccgcccccaacactcaggaccggggacccgagcccgccagagaccctccacaagtgagggtcccccggggt

SEQ ID NO: 4349 - DNA, 72 bp, Homo sapiens
tcatgccccgacaccctacttcccaaagcctggaccggtaaagttcttttcaccagaaaggacaagggcaag

SEQ ID NO: 4350 - DNA, 72 bp, Homo sapiens
tgcaaagttgtacatactatacatacagtacttaacggggtatcaagtttattctcttagcactgagcagga

SEQ ID NO: 4351 - DNA, 72 bp, Homo sapiens
ggtgctagccagatccactgcacgcttggggtttccgctcccaccctggccagggccctgggcagcttcccc

SEQ ID NO: 4352 - DNA, 72 bp, Homo sapiens
agtaggccccggttccccataccccgccccggtaccgtgtgtatccacagcaaaacatggctcttcccatcg

SEQ ID NO: 4353 - DNA, 72 bp, Homo sapiens
cacagctcagttcctgccatggcaagaacacagttcggcccacacatcccagcaccaaataacacatgaggc

SEQ ID NO: 4354 - DNA, 72 bp, Homo sapiens
tatcttctgtttaatatgattgctaggttaaaggtcgttccttccctgccatccccatttaagcaacaatga

SEQ ID NO: 4355 - DNA, 72 bp, Homo sapiens
gaacagaagtgtccagtaaacccacctgcattccacgtgtcctgtggccgcctccagtggtgagtctgtgag

SEQ ID NO: 4356 - DNA, 72 bp, Homo sapiens
agcgacccgggcagcttgagcaggggcaggctgggcggtgcctacgggtctctgtccaccggagcctctgtt

SEQ ID NO: 4357 - DNA, 72 bp, Homo sapiens
cttcttgcacacaaggggctccagcaggggcacctcgtggatgcgcgggcacagcgcagtgcccagcacctt

SEQ ID NO: 4358 - DNA, 72 bp, Homo sapiens
aagaactggtttgtcagggctgccaagtaggacagcgagccctaggagggcttctccaggtggtggtgactt

SEQ ID NO: 4359 - DNA, 72 bp, Homo sapiens
cctgccaaaaagctgattcttcaaaaaagtgttctcgaaatcttagtgtaactggcaccaacacccatcccc

SEQ ID NO: 4360 - DNA, 72 bp, Homo sapiens
tccccaaggccctgtcagttagccaggatggtccccgaagccagcattctggtcttctgcaattggctgccc

SEQ ID NO: 4361 - DNA, 72 bp, Homo sapiens
ctaggggaaggaggtcaggggtcagggtgaggatgcggcactcttccctaagccaggaaatgcctcctgaga

SEQ ID NO: 4362 - DNA, 72 bp, Homo sapiens
tgtgtgtggtatcgagcgagggctgggaagggagccggctcctctcctggaaccactctgaaaggtgaacaa

SEQ ID NO: 4363 - DNA, 72 bp, Homo sapiens
gccgactcatggccaaactccggttttcccgaaggcgccgggccaacacaggatctgatagtgcagggtcaa

SEQ ID NO: 4364 - DNA, 72 bp, Homo sapiens
ggtgctcccctccacctctctctgcagcctcccctcgagctgagctgatgatgtccaggttgtggttgtctc

SEQ ID NO: 4365 - DNA, 72 bp, Homo sapiens
tggaatttccgggagctgagcagtttaggtcagagcgctggggttaaaaccagccccatgttagatgcatgc

SEQ ID NO: 4366 - DNA, 72 bp, Homo sapiens
ttcatcatgagtctttgctttagttgacacagcttcgcactagcacccaccgcgccagtgggggccgccttg

SEQ ID NO: 4367 - DNA, 72 bp, Homo sapiens
aatgtttgttttccttctgagaaagagcggagggacgtggccaagaccaacatgaactgcaaacacgggaca

SEQ ID NO: 4368 - DNA, 72 bp, Homo sapiens
caatcctccctggctctagaatgtcatttaaaagtcgagtgtcttcttccttccctgttttgaagcagccct

SEQ ID NO: 4369 - DNA, 72 bp, Homo sapiens
ttggatcatgggggcagtttcctccatcctgttctcgtgataatgaatgagttctcacaagatctgatagtt

SEQ ID NO: 4370 - DNA, 72 bp, Homo sapiens
tgacatatttccaaaccccatgataacttaggccacgtgaagtcactgcggaagtcttgttcctgtttgggg

SEQ ID NO: 4371 - DNA, 72 bp, Homo sapiens
aaagaggagacatgcaggccaaactccacagtgcccgcaggcagcaggctattgcttgccgctgcaacttgt

SEQ ID NO: 4372 - DNA, 72 bp, Homo sapiens
attgtgacctttcttcccttgagtactgtgccatgcgctgactgcatcaggccagctggtaaaatgagactc

SEQ ID NO: 4373 - DNA, 72 bp, Homo sapiens
gatgtggggcccacgaggagccagcctggcgctgacgcttcgcgttaggatggacgagctgaggattcgttc

SEQ ID NO: 4374 - DNA, 72 bp, Homo sapiens
ttctcaaacaattccagccctcatgaccacaacctcgccaccttcttcccatccccttccctccaccagctc

SEQ ID NO: 4375 - DNA, 72 bp, Homo sapiens
gtagaccagtaggttctattgccccctctttgcctcgaagctgggtgctttccaggtgctgctggaagctgc

SEQ ID NO: 4376 - DNA, 72 bp, Homo sapiens
gacagtcctggcgagtcaatctgctcgtatctgcccgtgccatctctgtgccagcctccccactccttccct

SEQ ID NO: 4377 - DNA, 72 bp, Homo sapiens
ccatgacctggctgcgtactggcccaccaagcattcgactggcgtgcccagccactctccgtcatcgcagag

SEQ ID NO: 4378 - DNA, 72 bp, Homo sapiens
agggaggccaggcagcaggatggcaggcagacaggcggcagcaggggacaggcggcaaggccagaggaggtg

SEQ ID NO: 4379 - DNA, 72 bp, Homo sapiens
cagttcaaagagatctcagctatgtcattttagtccggctcagtctttccagctgcaagaaaaagaaagact

SEQ ID NO: 4380 - DNA, 72 bp, Homo sapiens
catggctcattggctgtctcaggagaaaacatcatcgccctgcccatggcagcttaggttattctagggctg

SEQ ID NO: 4381 - DNA, 72 bp, Homo sapiens
gaagagtttgtccaatgtcatagccccgtaatcaacgggacaaaaattttcttgctgatgggtcaagatggc

SEQ ID NO: 4382 - DNA, 72 bp, Homo sapiens
acacgcccacacctctggcagctgctttgcaagcacgcagcagggttgagttgttgcaacatagaccacagg

SEQ ID NO: 4383 - DNA, 72 bp, Homo sapiens
aaagtgctgggattacaggcgtgagccaccactcccggcccaaccccatgttttctcaggaactggagttcc

SEQ ID NO: 4384 - DNA, 72 bp, Homo sapiens
cggcctcccgctcccgttcccgcaccctgaggacgcgctggctgattgtggcacgcgtgccttccgagccca

SEQ ID NO: 4385 - DNA, 72 bp, Homo sapiens
atcctggacaaaaacccaggggcgggaggcacatgcgcgttttgggatcagggtgcatcctgttggtggagt

SEQ ID NO: 4386 - DNA, 72 bp, Homo sapiens
taaagtcattccccacccaaccactatcatcaccacgacccccagggtaagggctttaggacctggaatccc

SEQ ID NO: 4387 - DNA, 72 bp, Homo sapiens
ttgtgcaacttgagctcaggccccaaggggcagggcgcagcaacaactggagaggtagatggagctgttctg

SEQ ID NO: 4388 - DNA, 72 bp, Homo sapiens
ttttccgagccttggtttcgtcacccataaaatggcgatgatgatgtttccctcacagggtagttttaagat

SEQ ID NO: 4389 - DNA, 72 bp, Homo sapiens
gtgtcttgccacagaaaattacaatgtcaaaaaaacggattttagaaagatacactgtttgaaacctaaaat

SEQ ID NO: 4390 - DNA, 72 bp, Homo sapiens
aagtaactgcaggaggcgaggggaagcctggagcccgggaagtgtccacaggtctggcccgcagctcatctt

SEQ ID NO: 4391 - DNA, 72 bp, Homo sapiens
aacccaacaaatcaaacttaccctggtgatatagccgggggttgaaaaatcaagaccaaactctttttgcat

SEQ ID NO: 4392 - DNA, 72 bp, Homo sapiens
tctcacctgagcagcttctgatgcaagaggggtgtcgtgagtgcctggaatcctatgcctgtgggtggagcg

SEQ ID NO: 4393 - DNA, 72 bp, Homo sapiens
agactaaagtgaatgattgccacagtcattccctccggtggcttctccccaagtacttggcgccagagcgcc

SEQ ID NO: 4394 - DNA, 72 bp, Homo sapiens
taaaccttcgggtttcatatctattatttgccttccgtgcagtgaagatatattaggcaaatgactgtttcc

SEQ ID NO: 4395 - DNA, 72 bp, Homo sapiens
cagtcagccccgggggggatggcacagtggagagacggacctgcagaagtggtggccaaggcctctgtaagg

SEQ ID NO: 4396 - DNA, 72 bp, Homo sapiens
tttcttgctcagcatttccttttgggacgctgttgcgcattagaatgagatatactgaaagtagcataaaga

SEQ ID NO: 4397 - DNA, 72 bp, Homo sapiens
tcacatcatcttatggctttaaagcccctcaaccacgtcctgctgatctgacaaaacccaagtgcttacaca

SEQ ID NO: 4398 - DNA, 72 bp, Homo sapiens
caagtccccactttagaaaagcatctggatgcccacgccaccaccctcccagccacctctgaagttgccagg

SEQ ID NO: 4399 - DNA, 72 bp, Homo sapiens
cctgccacgggactgctgtgggctgagactggtgtcgcctctcccttgaaagcatggcctgctctgccgtgt

SEQ ID NO: 4400 - DNA, 72 bp, Homo sapiens
accaactgccaaggcctgtgtataagggcagccgccgccttagccacagacctgccccgccatgacccggct

SEQ ID NO: 4401 - DNA, 72 bp, Homo sapiens
ttgtggtagccttgaggtctcatgccttttgaactcgtgggaggcagtatgaagttggaaaagcattttttt

SEQ ID NO: 4402 - DNA, 72 bp, Homo sapiens
gtcacctttatggttctgcttcctcatctgcaaaacggagatagtcactcctgctcccagagctgctggggg

SEQ ID NO: 4403 - DNA, 72 bp, Homo sapiens
tcacgagggcgcccctcccccgcctcagctgccgccgcccttcccaggcaccgcactatccccgttagtggt

SEQ ID NO: 4404 - DNA, 72 bp, Homo sapiens
caccggccagagctgagtctggcttgtggggttcgcgggggcctcctgaaagaagggaaggaaagattgaaa

SEQ ID NO: 4405 - DNA, 72 bp, Homo sapiens
tgctcctggtcccttgcctgcacacaaacacataacgaccctgcagaccagatgttccagggcaggcctaat

SEQ ID NO: 4406 - DNA, 72 bp, Homo sapiens
aggcgcagaaggcagtacccaggcctgggaaatcacgaagagacacagtcgggaaagtgggcctccagaaca

SEQ ID NO: 4407 - DNA, 72 bp, Homo sapiens
cccacagataactcagacagccagattctgggggtcgttcaggttgaaagactggtcgaaattacgcgggca

SEQ ID NO: 4408 - DNA, 72 bp, Homo sapiens
ccttgcttgcaattctgagcattctgtagcaaactcgtttggccatcaaaccagacctcaattgagacaagg

SEQ ID NO: 4409 - DNA, 72 bp, Homo sapiens
gccttagatgagagaaacagccttgaaacagaccacggagaaaagaaggagaacatgaaaatgccacctccc

SEQ ID NO: 4410 - DNA, 72 bp, Homo sapiens
tgacatggttgggtctatttgttacaacagttagacgtcagtagcagaagcagagaggccccatcatttttt

SEQ ID NO: 4411 - DNA, 72 bp, Homo sapiens
ctgtttggcactcgtccttttgtgactgtactattcgcttggcataacgccctccaggtcagcccatgtggc

SEQ ID NO: 4412 - DNA, 72 bp, Homo sapiens
ggttccaaggtcacagccctgtgaggaccatgcgccgtggctgttttgcgggggtgctcacacagggctagc

SEQ ID NO: 4413 - DNA, 72 bp, Homo sapiens
gtccagcctggaagaggcccctttccatctgcctccggccacctgtcctgagtactcactccttccagacag

SEQ ID NO: 4414 - DNA, 72 bp, Homo sapiens
catcctgcagccaccaatggcatgacccagggccccggcactgcctgtgtgaggggctggcagctttccaac

SEQ ID NO: 4415 - DNA, 72 bp, Homo sapiens
ttgtgttttgtttttgcaactatgggaaactggaacgagcttataggaaaggggaagcaggaggggtcagca

SEQ ID NO: 4416 - DNA, 72 bp, Homo sapiens
ctgaaatggtatttccacggcaggcagcccttggacggaggactcatgtggactggtgggcatttcccattt

SEQ ID NO: 4417 - DNA, 72 bp, Homo sapiens
gatctagagcagccggttcccagtcatcggtgtttcgttccaaccaggagatgagggctggtttgggacctg

SEQ ID NO: 4418 - DNA, 72 bp, Homo sapiens
cagcagtgaccaacgacagccccgtgttgtcctcccggagcttacggttcagtaagggacacagacacgttc

SEQ ID NO: 4419 - DNA, 72 bp, Homo sapiens
acaggtggggtcctggatcggtttcgccatcatgacgcagtgtctcccaggtgagcctgccgccctccctcg

SEQ ID NO: 4420 - DNA, 72 bp, Homo sapiens
ccagggctggcgttgtgaagaccatgacaggaggccgagcgcagagcattggcaggaggggcaaggtggaac

SEQ ID NO: 4421 - DNA, 72 bp, Homo sapiens
aggagtgggcctcaccaggggctctgttcacctctcggagctcagcagtcatctccctcactctgacactcc

SEQ ID NO: 4422 - DNA, 72 bp, Homo sapiens
ggttaagatcccccacgaagtacagaccagcattccgagcctgcagagtcaaccaaaatacagttactgaac

SEQ ID NO: 4423 - DNA, 72 bp, Homo sapiens
cagccaggggccacaggaaaggcatcagaactcctcggggacacgagaagttcaggcagggtcagggcgctt

SEQ ID NO: 4424 - DNA, 72 bp, Homo sapiens
gcatttctaaggagtctcaggtgatgctgactgctcgtctggggactgcactttcaggactgcagctgttaa

SEQ ID NO: 4425 - DNA, 72 bp, Homo sapiens
caagtacacagtagccagtgtgacccagaggctcccggaggcccctgccggcttcctccaccagcgcctgcc

SEQ ID NO: 4426 - DNA, 72 bp, Homo sapiens
tgttcctctggggcttctatgcctaagaccaactgcgttggacaccataagccacagcctcacaggaagtgg

SEQ ID NO: 4427 - DNA, 72 bp, Homo sapiens
agcgggtgctggtcactaagctggctccccaggggcgtgatggagttgaccagggtcgtcaggttgatgaaa

SEQ ID NO: 4428 - DNA, 72 bp, Homo sapiens
taaaagggtgggagcgtccgggggcccatctctctcgggtggagtcttctgacagctggtgcgcctgcccgg

SEQ ID NO: 4429 - DNA, 72 bp, Homo sapiens
taagaggtcacagctgtgcacctggcagacggccccgacacactgatccttgcagccttctgagacatcagc

SEQ ID NO: 4430 - DNA, 72 bp, Homo sapiens
cctggacaggagatcagcctgtaggagctagcgatcggcctgtctgaggctcttcttcctctgatggggaag

SEQ ID NO: 4431 - DNA, 72 bp, Homo sapiens
cagggctgtgagtacaaaatgaaatgctacgaagtcgaatggatactttgcttcccatcttttccctttagg

SEQ ID NO: 4432 - DNA, 72 bp, Homo sapiens
agggcagagacaatggctgcaggaaatcattcaggcgggacatgctggcctgccctccacccagtccccctg

SEQ ID NO: 4433 - DNA, 72 bp, Homo sapiens
ggaatgccttgccagagcagcgcatagcaggctcccgagaaggattaacactggctgaacaccgggaaggaa

SEQ ID NO: 4434 - DNA, 72 bp, Homo sapiens
tgcccgtccacttgctctttttgcggttctacaagcgtgacaaagacgagcattaccggtaagagagaaatg

SEQ ID NO: 4435 - DNA, 72 bp, Homo sapiens
aaagtgctgggattacaggcttgagacacggcgcccggccaaagccagcagttttcaaacccacaacaggtg

SEQ ID NO: 4436 - DNA, 72 bp, Homo sapiens
cctcggtgctctggacttcgggagccaggttactccgggttggtctcctcagcacaccgagcagcaccccgg

SEQ ID NO: 4437 - DNA, 72 bp, Homo sapiens
gtcaattttcagcgagggagatgtccagtggtcaacgggatatgaggagagcggtttgacataacattcaga

SEQ ID NO: 4438 - DNA, 72 bp, Homo sapiens
tcgggaggggctgtaaagcagcagagaagaccaggcgagggatctgcaccagaggaagggaggcaggccttt

SEQ ID NO: 4439 - DNA, 72 bp, Homo sapiens
acactcccttgatggtcacgtgggtcccgggagggcgcgtgtgactcttcccaggattgcagcgttggggcg

SEQ ID NO: 4440 - DNA, 72 bp, Homo sapiens
ctcactccttggtcctggatataagcaggttctcacggcagtgtgagcagcagtcagggagagaagtgcctt

SEQ ID NO: 4441 - DNA, 72 bp, Homo sapiens
acaggaaccacaggctctccaggtggggaggctggcgctgaggaatgttctcctgaacaaagggctcggctc

SEQ ID NO: 4442 - DNA, 72 bp, Homo sapiens
tttgtgtttactcaggcgacctgagctggccccgacgtcttttggctttggagaggccacggatgcccaagg

SEQ ID NO: 4443 - DNA, 72 bp, Homo sapiens
agctcaggaacgctgcctgaggaccctggggcctacgaggaggagaagagggcaggagctggtggggtgctt

SEQ ID NO: 4444 - DNA, 72 bp, Homo sapiens
atgggtgacttttagtgacctataaattttgcaggcgcgccacggcactctattattgctttctttctctga

SEQ ID NO: 4445 - DNA, 72 bp, Homo sapiens
tgttagtagtccaagaaatctctgatgatccatcccggctgactcctgtgctcacactctgctcagcggtgg

SEQ ID NO: 4446 - DNA, 72 bp, Homo sapiens
catatgataacacagcaaacgagagcgacagattacgcagctctagggcagagtttctcaaccttggcactg

SEQ ID NO: 4447 - DNA, 72 bp, Homo sapiens
aactgattcaaccagataacgcagggaaaatgcttcgcacgccgcctgacacgaacttactgtgcctggctg

SEQ ID NO: 4448 - DNA, 72 bp, Homo sapiens
ctttctctgtcagagaagccactgcaagatgctgccgaagataaccctctctttcctgcctcattcttctct

SEQ ID NO: 4449 - DNA, 72 bp, Homo sapiens
gtcaactctgactgccctaccacatcaaaggagggcgtgaggctactgagcaaagaaacagaagtccccagc

SEQ ID NO: 4450 - DNA, 72 bp, Homo sapiens
acccctcccccttggctgtcttccatagatgcacacgcgcacctcccgggcaggcagcggacgctgagcaaa

SEQ ID NO: 4451 - DNA, 72 bp, Homo sapiens
ggcttgccgtgacagctaccactcctattggtcaacgcgaacagcgacgtcctctgcgataggctgtaggtg

SEQ ID NO: 4452 - DNA, 72 bp, Homo sapiens
ggctgaatccgtttctggcccttccagagtctgctcgctgcccaccttccttggctatggctgccccattct

SEQ ID NO: 4453 - DNA, 72 bp, Homo sapiens
tttcccttaggacagcggcggtttccagatggtgtcgctggtgtctctgtccgaggtgacggaggagggcgt

SEQ ID NO: 4454 - DNA, 72 bp, Homo sapiens
cactgtatttataagactggtggattgcacaacctcgtcgacggaactgaagggaggtgccacagtcaaggg

SEQ ID NO: 4455 - DNA, 72 bp, Homo sapiens
gcctaggttggcccagacgctgttctaaacctccccgaggtgaccttgctgcctttgtctccatgagcctcg

SEQ ID NO: 4456 - DNA, 72 bp, Homo sapiens
aaaaggtcattgggatggcttcttagaagcccttgcgttgctttttcgtttggtaacggggctaggaaatct

SEQ ID NO: 4457 - DNA, 72 bp, Homo sapiens
gcaagaaggcagaagggaagactatggagctggggcggggactggccagaaagtctgggcagtgaagtctta

SEQ ID NO: 4458 - DNA, 72 bp, Homo sapiens
atcgttcactcttcttgtgaagacgtggaatgacacggtgcctacgtgataagaggaagtgaggtgatggcg

SEQ ID NO: 4459 - DNA, 72 bp, Homo sapiens
tgcacctggtggtgtggctgtggactctgacagagcgctccgagtcttttcctgggtctagcacgttgctgg

SEQ ID NO: 4460 - DNA, 72 bp, Homo sapiens
ctcgggcagctcctcctctccagtccatgcagcttcgggccagctacccagtgttctcccaattggggctct

SEQ ID NO: 4461 - DNA, 72 bp, Homo sapiens
gacagcctgattccataaacacactaatatggcaccgtggattgtttgcagcctcacctctaaagtattctc

SEQ ID NO: 4462 - DNA, 72 bp, Homo sapiens
tcataccccactgtatgtggtaccacaggggtaaacgcacacttggattgcttccaccttctggatctcgtg

SEQ ID NO: 4463 - DNA, 72 bp, Homo sapiens
ctctcttgcctttcctcctttctttgagcttgtttcgctctgagagtacaggcttggcacccacttacccaa

SEQ ID NO: 4464 - DNA, 72 bp, Homo sapiens
tgctgcgagtggcacccatgacaggaagatttagtcgctgggaaacaggaacttcatgggggttaacaaaag

SEQ ID NO: 4465 - DNA, 72 bp, Homo sapiens
acagccgaaagtgcttgggaaatgcctgcaaatgccggcagtctgatgcacgcagagcctgaaccaggggcc

SEQ ID NO: 4466 - DNA, 72 bp, Homo sapiens
tacaccagacacgcatatactgcgtacaccagacacgcatattctgcgtatgccggacacgcgtatactgcg

SEQ ID NO: 4467 - DNA, 72 bp, Homo sapiens
taggcagatcacatctctttttgtgccctggttttcgtcacccccaagacaagagggttgaacaagagtctc

SEQ ID NO: 4468 - DNA, 72 bp, Homo sapiens
acatttctatttccagctaaacatttccacctcatcgtgtctgaaactgaactcctaatcccgtgccacttt

SEQ ID NO: 4469 - DNA, 72 bp, Homo sapiens
taaagttttatcttcagttcccttttagactatggcgacatacctggagttcatccagcagaatgaagaacg

SEQ ID NO: 4470 - DNA, 72 bp, Homo sapiens
ctcgtcctttacagaatgtttgccaatctatggtccggagtccaaggctgtccatttttcaaagaacacaaa

SEQ ID NO: 4471 - DNA, 72 bp, Homo sapiens
ctcatgggcttcctgggctgcatcggcgccgtcaacgaggtccgctgcctgctggggctggtgagtacggat

SEQ ID NO: 4472 - DNA, 72 bp, Homo sapiens
ctcactcgggatcccccagcaatgtcctttgttctcgaactcccagtgactcgaggggtgtcctctgattgc

SEQ ID NO: 4473 - DNA, 72 bp, Homo sapiens
gtcctcctcacattctctcccacccaacttgatgtcgcctctgtgtcatcaccacgggattttcctcctctg

SEQ ID NO: 4474 - DNA, 72 bp, Homo sapiens
atgctactgccaggactgacgaaagcagcagcactcggccgaaaagccaaaacacgaagaagggcaaagcgg

SEQ ID NO: 4475 - DNA, 72 bp, Homo sapiens
cttgcaggcctgactaaaagttgcagtggagaagtcgggtctgcaggaggcttggctggtgtgcgccgggtt

SEQ ID NO: 4476 - DNA, 72 bp, Homo sapiens
ctgggcctttaccccgatccttaccccccgccctccgctggtagcatcaaactggcctggtggcacctaagt

SEQ ID NO: 4477 - DNA, 72 bp, Homo sapiens
ggggaacacaggtccatgaaggccgcggggactgtcggggcagggatggagaaagactcactagagaagctg

SEQ ID NO: 4478 - DNA, 72 bp, Homo sapiens
gctggttctttgaggaatttgtcccaggcgtcaaacgctacctgcgccgaagctgcctgcagcagaaggccg

SEQ ID NO: 4479 - DNA, 72 bp, Homo sapiens
cctcaaaggcgactgaagggcagcaggcccatgctcgcttctgtctgcccgatgagtcacttcaccctaggc

SEQ ID NO: 4480 - DNA, 72 bp, Homo sapiens
cgggttccccttctgctccaggagggaggtggcggcgtgactaaagggcattggcctggggtcccctgcggt

SEQ ID NO: 4481 - DNA, 72 bp, Homo sapiens
tcccctgagggcagagctctgagccccagcctgtccgacaccagctggttcctctaaagtcaccctggcccc

SEQ ID NO: 4482 - DNA, 72 bp, Homo sapiens
cttctgctgtctgcatcgctatctcctccagggcacggctgcctgactccttctcatcatccacatctcagc

SEQ ID NO: 4483 - DNA, 72 bp, Homo sapiens
ctttttttcctttatatagagactgagtcttgctacgttgcccaggctggtctgaaactcttggcaattctc

SEQ ID NO: 4484 - DNA, 72 bp, Homo sapiens
tcagagtctgctggtgagatgacatcaaaacccttcgtgtaggagggtggcagtctccctcccttctggaga

SEQ ID NO: 4485 - DNA, 72 bp, Homo sapiens
cacagcttcaacactacagcattctctgtggtaatcgttctctccctgtttcttttccactacgttacatga

SEQ ID NO: 4486 - DNA, 72 bp, Homo sapiens
ggcttcaaaagtttgctgagctaccgcagggaggacgaaggctataacactggtccagcctgagagaagccc

SEQ ID NO: 4487 - DNA, 72 bp, Homo sapiens
ctatttccaaaattgtttatcattccagacagaaacgctaaccattaagcagtaactccttacttcctattc

SEQ ID NO: 4488 - DNA, 72 bp, Homo sapiens
tcctcatctgtcacatgggataattatggtgcccacgcccaggcatgtcatgaggatgaatggagttaatgt

SEQ ID NO: 4489 - DNA, 72 bp, Homo sapiens
cagactacaactgattgacacgtaaaatcagtcaccgttttttccctacgattacaaaactgccagtcctat

SEQ ID NO: 4490 - DNA, 72 bp, Homo sapiens
ctgtgctaaagaatgactgggacatgagatcaaagcgcgaagctctgtcctccagtggtttgcaacacctag

SEQ ID NO: 4491 - DNA, 72 bp, Homo sapiens
aattgtgtgcaggaggatgaaaactttggcttaagcgtgggcttaaccaagcaggaagggaaagtggctggc

SEQ ID NO: 4492 - DNA, 72 bp, Homo sapiens
aggaaggacatcgcgcactttcaggccggctggttcggtcttggcctcgttgacttatgttgactctcaagg

SEQ ID NO: 4493 - DNA, 72 bp, Homo sapiens
aagaaaatcctaggtccaaataaggcgagggctgccgggagcacggtgagctggccaagtcctcctgagcaa

SEQ ID NO: 4494 - DNA, 72 bp, Homo sapiens
tcatttatgattgctcaatattcttgagcaaaatacgactgtcatctgaatccagagtagaagagaggattt

SEQ ID NO: 4495 - DNA, 72 bp, Homo sapiens
ccaccccatggtttatttcacaagagtgtgtttggcggcaactttgctgtttccagctagaccagacccaat

SEQ ID NO: 4496 - DNA, 72 bp, Homo sapiens
agtcaggaaagacctggagtgtgttcatggtatcacgtatggtctggtttggcagaaacagtatgcaggagg

SEQ ID NO: 4497 - DNA, 72 bp, Homo sapiens
aggtccttgggctttgccttccctcacctcgaagacgcttttaggcaaatgagtcatctcaggttcattcgc

SEQ ID NO: 4498 - DNA, 72 bp, Homo sapiens
aacgtgggaccttcagaaggctctttcaggctgggcgcggtggctcacgcctgtaattccagcactttggga

SEQ ID NO: 4499 - DNA, 72 bp, Homo sapiens
ttaatcctctgttcttctgagcctagctctgaaaacgtcagaaatagcatctagaaagcagagagtagtaga

SEQ ID NO: 4500 - DNA, 72 bp, Homo sapiens
gagtcctcccactctgaggctggtgaaggggaggacgggactgtttgatgagtagttactgcttgtgtgtgt

SEQ ID NO: 4501 - DNA, 72 bp, Homo sapiens
tgcccacgaggatgatgggcacatcatctgtttgccgtgcacgccgcagctggacccgcagttctgaggcct

SEQ ID NO: 4502 - DNA, 72 bp, Homo sapiens
gacagccagacagtggaaacaaggcaggtgggcctcggctgctgagggagcaacagcagaacggtgctcagc

SEQ ID NO: 4503 - DNA, 72 bp, Homo sapiens
atgctacagctcttattaaagagttttgtagacatcgtcttgctgtcacccagactggagtgcagtggtgca

SEQ ID NO: 4504 - DNA, 72 bp, Homo sapiens
cctgcagggttgcctcccctcatgtcgcccccagccgcacctgaaggccccctcagttggccctctcagccc

SEQ ID NO: 4505 - DNA, 72 bp, Homo sapiens
tcagcagggataaagagccaatctaataggccgggcgcggtggctcgctcctgtaatcccagcactttggaa

SEQ ID NO: 4506 - DNA, 72 bp, Homo sapiens
actgggccagctccagctgtgcagcctgaggactgcgcacaaacgcccctccgttccaccccacccccgctg

SEQ ID NO: 4507 - DNA, 72 bp, Homo sapiens
agggcagagcctcttctgccatctggagggttgagcgtctcccagctccctggaactttgggatggtttcgg

SEQ ID NO: 4508 - DNA, 72 bp, Homo sapiens
gttctggaatggacaagccgggacctgacccttcgcgtctccttcttgacctgtttatctaggactccaact

SEQ ID NO: 4509 - DNA, 72 bp, Homo sapiens
cggcgcaccttcctgcactgcaggggctggggtcccggcctggcagagtaaccagaatgcgagggaaagccc

SEQ ID NO: 4510 - DNA, 72 bp, Homo sapiens
gggagacaaaggcgtgggtgaccacaccaatgccccgtgggaggccctgggtgacattttgcctgaacataa

SEQ ID NO: 4511 - DNA, 72 bp, Homo sapiens
aattaagtcggctgcatggcccgcgaggcccctgccgagcactcagaacccactctgcagcttgctctttcc

SEQ ID NO: 4512 - DNA, 72 bp, Homo sapiens
agagctaacgtcatgtgtctggctgctaaaagctccggctccttttattaccacagtaaaggaagataacag

SEQ ID NO: 4513 - DNA, 72 bp, Homo sapiens
gcccctctgtatttctattcccctttgcttttctgcggagcttttacctcagaggaaagttgttttagtaat

SEQ ID NO: 4514 - DNA, 72 bp, Homo sapiens
gaagtaatgggagttaaaacagtgagtcaaaacagcgagttaaccacaaatcaaagtagttcttcaagaagg

SEQ ID NO: 4515 - DNA, 72 bp, Homo sapiens
ctgatgtaaggaaatgacaattgtgaaagacccagcgtgagagaatctgatgggagggtgggtcatcaggga

SEQ ID NO: 4516 - DNA, 72 bp, Homo sapiens
aacaccagctgtctgttgtgctgcggctgctgcgacgccctgcccggcccccttttgggtagaatctcttct

SEQ ID NO: 4517 - DNA, 72 bp, Homo sapiens
ttccgggtttggggccaagtccctcttggccgcagcgtggcggattccccgagccacctccatcccgccacc

SEQ ID NO: 4518 - DNA, 72 bp, Homo sapiens
tttcctgcaaggagctgctgcatgcctgtttccctcgccgcctgccccaacccgaatccaaggctttggttt

SEQ ID NO: 4519 - DNA, 72 bp, Homo sapiens
ttaaaactcttcaagcaagtcatctgcaaaggtaccgcttctaccattttaaagataggattatgttcccta

SEQ ID NO: 4520 - DNA, 72 bp, Homo sapiens
gaaatattgtgatattgccacagctgtgcctcaatcggaaaaaaaaaaaaaaaagcctgaggcttccccttc

SEQ ID NO: 4521 - DNA, 72 bp, Homo sapiens
gtgctagagtggcatctacttcaaattcctgacagcggcttctttaattgtgcaatctgtgtcagtggggaa

SEQ ID NO: 4522 - DNA, 72 bp, Homo sapiens
aagtctctaaacactcgcctctacccgccgccccgcgaaccccacacactgcagacgcgacactcgcaagtt

SEQ ID NO: 4523 - DNA, 72 bp, Homo sapiens
aaggctcagtggccccctgggcctttggcaggagacgtgtgaaaatccccagtggaatagggaaagccacac

SEQ ID NO: 4524 - DNA, 72 bp, Homo sapiens
acccaggaggcggacgttgcagtgagctgagatcgcgccactgcactccagtctgggcaacaagcaaaactc

SEQ ID NO: 4525 - DNA, 72 bp, Homo sapiens
ggaacatgccttgtcacctacttcctaaaaatagccgtgacctttttagtggacacagcaagctcacatctg

SEQ ID NO: 4526 - DNA, 72 bp, Homo sapiens
cttgcctggtgctgccctgttgaagataggggattcgaggttggggaggaaaggtcagacaggcatagtatc

SEQ ID NO: 4527 - DNA, 72 bp, Homo sapiens
ctcattgcactgaccggaacttagttacaatgccacgactagcagccggggtactgggaaacatagctttta

SEQ ID NO: 4528 - DNA, 72 bp, Homo sapiens
aggctgaagcaacctgcccaaagccactatgctggcgggtggccgagtttgggtttaatccaggcccgaacc

SEQ ID NO: 4529 - DNA, 72 bp, Homo sapiens
cgccgcccctctggcgggcacccacctccctggagcggcctcgctcccctcgagcacccctgggggctggca

SEQ ID NO: 4530 - DNA, 72 bp, Homo sapiens
gaattagttgattaagcaccatgttactcccctgacggaggagtatttaagctgcccttgcaagatggcaga

SEQ ID NO: 4531 - DNA, 72 bp, Homo sapiens
gagttccagcaggtggggggcgaatcacctttcagcgggcccaagcgatgagcacaccttgatcttcacctt

SEQ ID NO: 4532 - DNA, 72 bp, Homo sapiens
aagaagctcaggccgtggcagagccatgagccagccgttgaggaaggagctgcaggcacagtagggcttcct

SEQ ID NO: 4533 - DNA, 72 bp, Homo sapiens
atttactatataaatttaattttcaagcattggaacgtggtctatttctcaattctgtatacatttaattca

SEQ ID NO: 4534 - DNA, 72 bp, Homo sapiens
agcagtccacggccccacccacccgacggctcggccgtcaaagacctcctggcccctgccccaaccccaagg

SEQ ID NO: 4535 - DNA, 72 bp, Homo sapiens
cgaaaaatggaggttctatgatgcaaacacaggctcgactaacttcaacatgtgtaatataatcattatgct

SEQ ID NO: 4536 - DNA, 72 bp, Homo sapiens
gacgctggctgcctccctctgacttggcctcacggcggggcaggcattagcagtccaggcagcttctctctg

SEQ ID NO: 4537 - DNA, 72 bp, Homo sapiens
tccagtcacaaaggttcaaggtcaggagcgccgggcggggctggtcttcgccccggcggcgggaattcctcg

SEQ ID NO: 4538 - DNA, 72 bp, Homo sapiens
taagctgctgtatagttttctttttctttttttttcgcggggtggagcagagttttgcttttgtggcccagg

SEQ ID NO: 4539 - DNA, 72 bp, Homo sapiens
ttataaaggcagggccaggcaggcgggcggccaatcgccactgggctcgtcacgacagcctccttcagctcc

SEQ ID NO: 4540 - DNA, 72 bp, Homo sapiens
gcctgcccttttgggtaataaaacttggctcctaacgttaatacagaggtttctaagtggtgcctgcttcat

SEQ ID NO: 4541 - DNA, 72 bp, Homo sapiens
gcctgagcctggatgcaccctccgccctctggccccgtagtgtgtgtctgagacagagtgagacaccagcaa

SEQ ID NO: 4542 - DNA, 72 bp, Homo sapiens
cccttctccacccgggccctggcgctcggagcccgcgccgctccctcgagtcaggccgtccagggctctgct

SEQ ID NO: 4543 - DNA, 72 bp, Homo sapiens
gtgtgtggtccactttatgtcaacacccaaaacctcggtgttgcaaggaatgaagtgtccaaaacaccacta

SEQ ID NO: 4544 - DNA, 72 bp, Homo sapiens
tccagacgtggatctgcagctgggaatcaagtgatcgagaccttcaattctggcgggggtggggatgggtgg

SEQ ID NO: 4545 - DNA, 72 bp, Homo sapiens
atcatgacaggccatggttaactacatcagatacacgtagcagccgtgaccaagacatggtgccctaatacc

SEQ ID NO: 4546 - DNA, 72 bp, Homo sapiens
gcctgtgtaacatctagatctgccaggcatagatacgtgccaggcactctgctggtcactgtggttacagat

SEQ ID NO: 4547 - DNA, 72 bp, Homo sapiens
aatcctgtaagggagatactatcatgatctctgttcggtggatgaggaaacagtctgaggaaaggcacctga

SEQ ID NO: 4548 - DNA, 72 bp, Homo sapiens
gtcggcgagaagtagcagtactgtccccagccatgcgagagaagctccggggaggcagcggcacccgcgggg

SEQ ID NO: 4549 - DNA, 72 bp, Homo sapiens
tcctctcctcaagacatcaaatttcaagatttggtcgtcttcattttggagaagaaaatgggaaccacccgc

SEQ ID NO: 4550 - DNA, 72 bp, Homo sapiens
agccacagaggcgtgccttccacagaggcgtgctccgcagcgccgccctccagcactccgcgcatcggccca

SEQ ID NO: 4551 - DNA, 72 bp, Homo sapiens
gggttccgttcggggtgtgcctgggtgtgggactccgtctcggggcggcccgcggcctccgtggctgcgcga

SEQ ID NO: 4552 - DNA, 72 bp, Homo sapiens
cgggttcttttcttggctttgcaactgatcccgggcgtgaccttgggccaaacccttaactcgtgccctggg

SEQ ID NO: 4553 - DNA, 72 bp, Homo sapiens
tgctccagcaaagtggcgtgtgtctgtatggtgaacgtgtggttccgtgcctgcctttatgtcatgtcaggg

SEQ ID NO: 4554 - DNA, 72 bp, Homo sapiens
tgcttcatcaagtagcctgtgtagcgaggcgtgctcgtgattaagtattttctccatcccttggcctctttc

SEQ ID NO: 4555 - DNA, 72 bp, Homo sapiens
agaggatgttgatagtagtcattaaagattcgggtcgggtattagtggcatttggtagacagaacccagaga

SEQ ID NO: 4556 - DNA, 72 bp, Homo sapiens
tttattgtttaatgctcagccttggaaggatatgccgttccatatgttctaaaaggaacaaaacagtctacc

SEQ ID NO: 4557 - DNA, 72 bp, Homo sapiens
tcgggcgcgggagctacgccaaggttctcctggtgcggttgaagaagaatgaccaaatttacgccatgaaag

SEQ ID NO: 4558 - DNA, 72 bp, Homo sapiens
ctccactccaggcactgacttctccctaggacaatcgcaccatgggctcctgcctcttctcctccttacagc

SEQ ID NO: 4559 - DNA, 72 bp, Homo sapiens
gtccacagcgcccaggccgagccggcagggctgggcgggaggcttgaaaaagaaggagaagcgttcacttct

SEQ ID NO: 4560 - DNA, 72 bp, Homo sapiens
ggagtatctggaggattttgcatccatagtgaggacgaagctgagataagcagagtttaataaacagccgct

SEQ ID NO: 4561 - DNA, 72 bp, Homo sapiens
gggcggacccagggctcatggaggtagcacctggccggcaggccatggtttctcaggccagtcaaggccctg

SEQ ID NO: 4562 - DNA, 72 bp, Homo sapiens
gagtgggaaaaggagggatgtgggaactagctccacgctgacaaaactagatgcctgctatctctctggagc

SEQ ID NO: 4563 - DNA, 72 bp, Homo sapiens
ggacatttggcaatatctaaagacatttttggggccgggtgtggtggctcatgcctgtaatcccagcacttt

SEQ ID NO: 4564 - DNA, 72 bp, Homo sapiens
atcccagtcgttaagcaatgcgtgactatgcatcgcgatgcatgactatacattgcgatgcgtgactataca

SEQ ID NO: 4565 - DNA, 72 bp, Homo sapiens
gtgagccgtgtggggccaaggacatgtgggcaaaccgggctggctggtgctggcgacgtgttgacacaggtc

SEQ ID NO: 4566 - DNA, 72 bp, Homo sapiens
ggagatgggcaggaagctggagcccggctcatcgtcgcatagcctgcctgcacccgccccccgccaccacct

SEQ ID NO: 4567 - DNA, 72 bp, Homo sapiens
tcataaggcctaattcccaatgaagattcaggaaacggggatgtcagttccagttccactttctttttattt

SEQ ID NO: 4568 - DNA, 72 bp, Homo sapiens
acaacaaatcaagtcgcctgccctggcgacactttcgaaggactggagtgggaatcagagcttcacgggtta

SEQ ID NO: 4569 - DNA, 72 bp, Homo sapiens
gaccatcaaagtgagctggccagcgcttgctacctcggcgtggctgaggcctcctcgctggctgcactaccg

SEQ ID NO: 4570 - DNA, 72 bp, Homo sapiens
acttttcagtcacaaccgaggtgcccacagcatttcgtaactaaaacaaacagggcaggaggtggggaggga

SEQ ID NO: 4571 - DNA, 72 bp, Homo sapiens
aggactgagggtaggagagggctcccgggagtggccgatgacagccgcctccagagtgatctccaccacagg

SEQ ID NO: 4572 - DNA, 72 bp, Homo sapiens
aaatttgaaaacaacaggaaggtaagccagcagcccggccctgggagagacgctcttggcagccaccagaaa

SEQ ID NO: 4573 - DNA, 72 bp, Homo sapiens
ggcagagccagatcgggttaaatcaatggcaaaagcgccatgggggaagttagacgtgaaggtcttcgacct

SEQ ID NO: 4574 - DNA, 72 bp, Homo sapiens
gagtggggaggatctaggtgccagcagtctgaatccgggatcaggcgctgaccaccatgcaatacagccccg

SEQ ID NO: 4575 - DNA, 72 bp, Homo sapiens
aaggaggagcaggccggggcagcctcctagacacgcgtgcccaagatcgtgtcctatggtctcgcttcggcc

SEQ ID NO: 4576 - DNA, 72 bp, Homo sapiens
agtgtccccgcctggttgcaggtccctaacccctccgggagtgcagagctgcgggcaggccacactcaccct

SEQ ID NO: 4577 - DNA, 72 bp, Homo sapiens
gtaggagcagttaagaatataagtagaagggtttgcgaggtatttatttagtccaatctatgaggcctaatg

SEQ ID NO: 4578 - DNA, 72 bp, Homo sapiens
actgcaggtccagcagctgccactgcagggtggcccgggccctctgctaggtctcccagctgcttccatcca

SEQ ID NO: 4579 - DNA, 72 bp, Homo sapiens
ccagcacatggggctttgtgaattccttgttgcagcgtgaaggggatgcttgggagctatttgtcctcaccc

SEQ ID NO: 4580 - DNA, 72 bp, Homo sapiens
cagctcaggaaccagctgtggggttaagcaaacctcgtggagatagaggaacagactgagatctgggatatg

SEQ ID NO: 4581 - DNA, 72 bp, Homo sapiens
ctttaggtggatctgagccctcataccccaagtggcgataagcgcaccagtactctcagttggagaacaaag

SEQ ID NO: 4582 - DNA, 72 bp, Homo sapiens
cagagccaggatatagaacattggttctgtcttctcggctccgtgtcttcactgtcctggaggtttgaaggg

SEQ ID NO: 4583 - DNA, 72 bp, Homo sapiens
acttataactttcatacccgtatttaaagaagttgcgcctcccagagattctgctggaactgtatttcctat

SEQ ID NO: 4584 - DNA, 72 bp, Homo sapiens
caccagcgacaatcagaggttacataggcttggggcgtagcttttctgatcagatgagtttcacggctttag

SEQ ID NO: 4585 - DNA, 72 bp, Homo sapiens
cgccgttcagcggctgggcgctggagcgcaatctgcgccccccgggctctgcgcctctcagctgcgccgggg

SEQ ID NO: 4586 - DNA, 72 bp, Homo sapiens
cgagaacttgaaatgggttattttgtttgtctgttcgttgcttggttggttttcatgttatcttttcatctg

SEQ ID NO: 4587 - DNA, 72 bp, Homo sapiens
ccctgccatcatctctttcccacagaacttcccgacggaggagctgactaccagaagcccccagtgggtgtt

SEQ ID NO: 4588 - DNA, 72 bp, Homo sapiens
cctgaagtcaagcttgtctgggtagctgaaaggaccggtagcactgtttacttaaagacctctggacagtac

SEQ ID NO: 4589 - DNA, 72 bp, Homo sapiens
ccacagttcagcgatcctcatctgtacgtgtggaacgccactggcaacagactgttgcaccgagtggaaggg

SEQ ID NO: 4590 - DNA, 72 bp, Homo sapiens
caggcatggcaaaagggaaatagaaacatcagaaccggagagggaagaaacagggatgtaggctgctctata

SEQ ID NO: 4591 - DNA, 72 bp, Homo sapiens
ctctgctctgactgtacagtaggcaaaggaccccacgtggggagggcaccttgtgcctttctgggcctcagt

SEQ ID NO: 4592 - DNA, 72 bp, Homo sapiens
ccttggggagtggcttccgagtgtgtccttccttgcgtatttttcttcagccttagggcacttattgagttt

SEQ ID NO: 4593 - DNA, 72 bp, Homo sapiens
gcagctgtcactcactgagcactgagccatagccccgggagggctggccaggccactccctgcccgcttttg

SEQ ID NO: 4594 - DNA, 72 bp, Homo sapiens
tgactcacaggctcagaggggctgagcccccaccccgccccaacctcgaactggagcagggggtagggctat

SEQ ID NO: 4595 - DNA, 72 bp, Homo sapiens
gctaatagtcctttaccacaggtgttgacatttcacgtggcttgaaatagcccccagcattgttctacattt

SEQ ID NO: 4596 - DNA, 72 bp, Homo sapiens
cattcacacagagacatgtgcacacacacggggcccgtagactttccttaccaccccaccctctgctcaaga

SEQ ID NO: 4597 - DNA, 72 bp, Homo sapiens
gtaacccccgtcctccatggaagcaatgcccccctcgtccagcccaggatctaatgtgcatgcatgtacgtg

SEQ ID NO: 4598 - DNA, 72 bp, Homo sapiens
gttcacttgttgaattgaattcgtcaattgttgagcgggccgtgctgccaggcaccgcacgttgtgtgtctg

SEQ ID NO: 4599 - DNA, 72 bp, Homo sapiens
ttcattacagtcttgtggctgaggtcaccacgcagcgaggagggaagggacaaggaagcagcagaggtgtgt

SEQ ID NO: 4600 - DNA, 72 bp, Homo sapiens
cggccggtggtggggaggcacccccagtgtgggagcggcacgctcagggttacgccctggtccagttctgag

SEQ ID NO: 4601 - DNA, 72 bp, Homo sapiens
agtgccgtgcgtgtgcgtgcctctggtctcaggcccgtcacctgtgattcaggcgggccctccagctatgct

SEQ ID NO: 4602 - DNA, 72 bp, Homo sapiens
cggcctctggcattgggctataagaggagcttgaccgtgggtgcaccctggaccccaccatggctcaccggc

SEQ ID NO: 4603 - DNA, 72 bp, Homo sapiens
atggagcctatccactctgcttttgctggcaaactcgtttctgtccttcaaggcccatccaagtaacacctc

SEQ ID NO: 4604 - DNA, 72 bp, Homo sapiens
atagggaagaagaagtatgtttcagagggaaggcacgtacaaagggacacaggtaccttctggagccatgag

SEQ ID NO: 4605 - DNA, 72 bp, Homo sapiens
gcatccagctgtacttcttgttgggcttcagctcccgcgggagccgcaggttcttgagtgggtccaccacgg

SEQ ID NO: 4606 - DNA, 72 bp, Homo sapiens
caattgtcatttgaaagttagggctgagggccgggcgcggtggctcacacctgtaatcccagcattttggga

SEQ ID NO: 4607 - DNA, 72 bp, Homo sapiens
tccagcctctggctggacttcccgccctccctggccggcaccaaggctactgtcacctgagtggtttcccca

SEQ ID NO: 4608 - DNA, 72 bp, Homo sapiens
aacgaagcgagaatgaatcaaacattggtttacaacgaccccaagaaggaagggagacccagcagcagagaa

SEQ ID NO: 4609 - DNA, 72 bp, Homo sapiens
acgagcaacgacagctggcagggagtggggtggcacgcatgaagatcacaaaacagccattttctatagatc

SEQ ID NO: 4610 - DNA, 72 bp, Homo sapiens
cccaggttcattttcagtttaggccaaaatccccgcgggttgggcggggagggggcggggctagctgggcgg

SEQ ID NO: 4611 - DNA, 72 bp, Homo sapiens
gatgcccgctctctgcaggttgtgaaatactggcccgagaaggggaagtccgggtttctcgtgtggcgctac

SEQ ID NO: 4612 - DNA, 72 bp, Homo sapiens
tggtgagaacagcgctcgtgtcatcagccagactgcgccgcctggagccgggccagtggccgtgcgccgagg

SEQ ID NO: 4613 - DNA, 72 bp, Homo sapiens
agctcctagactacagttagcctaagaaaccatgccgccctccattttcttaccgatgaaaagcctatagtg

SEQ ID NO: 4614 - DNA, 72 bp, Homo sapiens
acgggagagggcagaaaaggcctatatggtgagtccgccctgggagcctctgcttggaagctgaagtggcct

SEQ ID NO: 4615 - DNA, 72 bp, Homo sapiens
accacactgcctctagatgagaggtctccaggcagcggtgaagcatggctcatgggatgaaatactaatgta

SEQ ID NO: 4616 - DNA, 72 bp, Homo sapiens
ttgaggaatttgtcccaggcgtcaaacgctacctgcgccgaagctgcctgcagcagaaggccgtgctgctgg

SEQ ID NO: 4617 - DNA, 72 bp, Homo sapiens
attagtcagacctcttggttttgcctccacaaacccgatttctttgtttgccctccccatctctaccccaat

SEQ ID NO: 4618 - DNA, 72 bp, Homo sapiens
acggtcggctgacaggctccacagagctccactcacgctcagccctggacggacaggcagtccaacggaaca

SEQ ID NO: 4619 - DNA, 72 bp, Homo sapiens
gaagcctgtgggctgctgcttctccaggcaggcggcggagggatgcaggcaggatgagcggcggtcccttcg

SEQ ID NO: 4620 - DNA, 72 bp, Homo sapiens
ctcccactgcactgctctgtggatggatgagccctcggtgctggcaggacagaggacacacagggtgtggac

SEQ ID NO: 4621 - DNA, 72 bp, Homo sapiens
atcatatccactgatagactgcacacgcagtggcacgcttaaaccgtcacacgtgctcttgtccatgcattc

SEQ ID NO: 4622 - DNA, 72 bp, Homo sapiens
cgccatcccaggaacgggctcccacagtgcagcggcggcctgaagagcccctcaagcacagccagagtgggc

SEQ ID NO: 4623 - DNA, 72 bp, Homo sapiens
ggacacacgatgtggaaattgcagcaggcatgcttcgtttttggcagccctgtcccacaccctattattaga

SEQ ID NO: 4624 - DNA, 72 bp, Homo sapiens
cctgccggctgctgtataacctcccggacctgaggcgtgtcagagaggatgcgttcttcagtgctgaggtca

SEQ ID NO: 4625 - DNA, 72 bp, Homo sapiens
atgtgacatgtgataggtggatgtagttactggtacggatgctgatgcaaatgtaagtatgtatttcgtaaa

SEQ ID NO: 4626 - DNA, 72 bp, Homo sapiens
atccttggaaaagcggcttcttgagtctcaacaaccggagggacacagtagggaagtcagggctcacctaaa

SEQ ID NO: 4627 - DNA, 72 bp, Homo sapiens
agactaaccattgtccttttttacccctcctgtgacggggctactacaggttacaaaatcgcgctcttcctc

SEQ ID NO: 4628 - DNA, 72 bp, Homo sapiens
tggcttgaaaacatccaactcaaaatggccattgccgcctccaacggttactgccacacaaaaccccatgac

SEQ ID NO: 4629 - DNA, 72 bp, Homo sapiens
gaaatttagggagagcctttgcaagccaccaaggacgttgcaaaattacacttataaatgggcatcagaggt

SEQ ID NO: 4630 - DNA, 72 bp, Homo sapiens
cagtttttctctttgtaaaggaagagtgaaaacgacgactcactctgttgtggggaaatacttacaaaagga

SEQ ID NO: 4631 - DNA, 72 bp, Homo sapiens
gtcagaggcaactcacacatatgtgccctcacccacgtgggaatgttcatggcagctttacacatgcaaagg

SEQ ID NO: 4632 - DNA, 72 bp, Homo sapiens
ggcttatgcagattggttccagccctctcaaaatgcgtctaattgcttaggaatgaggaagaggatgaccgg

SEQ ID NO: 4633 - DNA, 72 bp, Homo sapiens
aggcagcagttgctaatgaagacactggaggacagcgtggcttagtcagcacaggaaggaaatgacttagtg

SEQ ID NO: 4634 - DNA, 72 bp, Homo sapiens
acgtagcaatgagccaccaggtccctaaggtactacgttgcatttctcaatctgactttgtttagtttgggg

SEQ ID NO: 4635 - DNA, 72 bp, Homo sapiens
gcaggcccaagcacagaaatttccagaagtgtttgcgtggcagcagttcttagccaattcacattttttagc

SEQ ID NO: 4636 - DNA, 72 bp, Homo sapiens
tccagagacaggcttctctaaacagttaaagggctcggctgtacaggaggactccggacacaattggggagt

SEQ ID NO: 4637 - DNA, 72 bp, Homo sapiens
cctgcaaacagtgccagcctccaggccctgtgccccgaggtggcctttaatcttgcactcactctctaggaa

SEQ ID NO: 4638 - DNA, 72 bp, Homo sapiens
cgggggccctcctccttcacgaggatctgcagtggcgaggcctgcagggtcagctgcgtcagaggtgatgtc

SEQ ID NO: 4639 - DNA, 72 bp, Homo sapiens
ctgatgggctagagttcgtaagattcaggaagtaacgaaccaggaactctcttattccatggactgtggtct

SEQ ID NO: 4640 - DNA, 72 bp, Homo sapiens
cgattgcaaaattcctcctttggttttggaagcagcgtttgctctcccgtggctcggattctctgaggacca

SEQ ID NO: 4641 - DNA, 72 bp, Homo sapiens
ctcagattctgaaccctcgcagccacggcattctgcgagccttgtgtgacttccctaaaaaccacaactgct

SEQ ID NO: 4642 - DNA, 72 bp, Homo sapiens
agtgtactgagacttaatatctctctagtcttatacgtacgtacatactctttcagctacagcatacactca

SEQ ID NO: 4643 - DNA, 72 bp, Homo sapiens
atttgggacagtcactcttatcaagttcatcagaacgtttatctctggcctccaggaagaaggcctgcacag

SEQ ID NO: 4644 - DNA, 72 bp, Homo sapiens
gacggcaaggcaaagacactgctgctagaatgtgccgtcttcttgagattgcgaggagaaacgcaatataat

SEQ ID NO: 4645 - DNA, 72 bp, Homo sapiens
agtgagggtcagaaggattaaggagcttgcctagccgatgaggaagggaacaagataagatgcaaacctcag

SEQ ID NO: 4646 - DNA, 72 bp, Homo sapiens
gctgtcccaggagatcccagtgactgtggatgatgcgttcttgtggtcacacttggcttactttccccacgg

SEQ ID NO: 4647 - DNA, 72 bp, Homo sapiens
gaagggctgatttcctgggtgaccgtgaggagtgccgttactattgtggcgtattaactctttctgaacctc

SEQ ID NO: 4648 - DNA, 72 bp, Homo sapiens
cttcccactggcaaccagtgttacccgggtctcaccgatcccgggtgaacagtggtaatagggaggaagatg

SEQ ID NO: 4649 - DNA, 72 bp, Homo sapiens
gcaattagggagagccagagcttgcagtaggaccccggagatcatgacttagtagtaaacaccaaacgggtt

SEQ ID NO: 4650 - DNA, 72 bp, Homo sapiens
accccttactctgcctagcagtcacagtccttacgcggaggtgaatctgattctgtgagttcatcaggccaa

SEQ ID NO: 4651 - DNA, 72 bp, Homo sapiens
agtttgcagagaatccagctgaaggcagctccctccgccagctccctcggaaggaacgtgctgccgacccct

SEQ ID NO: 4652 - DNA, 72 bp, Homo sapiens
aggacactagcagcagagccggcgccggggcacaccgcgtgggaggcgccggggcacaccgcgtgggaggcg

SEQ ID NO: 4653 - DNA, 72 bp, Homo sapiens
tcggagatcatgcagcagaagcagaaaaaggcaaacgagaagaaggaggaacccaagtagctttgtggcttc

SEQ ID NO: 4654 - DNA, 72 bp, Homo sapiens
atccaacacactgggccacccacgcacagggacgacgcgacagccctgtggctccaccgcacaggacagcca

SEQ ID NO: 4655 - DNA, 72 bp, Homo sapiens
tcatattaatgttcaggccacaagttcccatttcacgtggagttgctgcccgattgcaggaaagtgctaatg

SEQ ID NO: 4656 - DNA, 72 bp, Homo sapiens
agtgtcaactccgtctttatgacaggccaactcagcgggtgcccaccacgcttggctccaattcaaagagcc

SEQ ID NO: 4657 - DNA, 72 bp, Homo sapiens
gccgggcaggatgcgaaatacctgctgctctcacccgctgctggagagaaggcagactgggtgaccacttgg

SEQ ID NO: 4658 - DNA, 72 bp, Homo sapiens
gcccgggaggccaggggtcagggctgccagcatcacgtgtctgttttttatctcctgagtgccaacagatgg

SEQ ID NO: 4659 - DNA, 72 bp, Homo sapiens
tgcaccaccatatcctgttttcaggtctcttatcccgtgtctttgccttcctttctgagaactcttactctt

SEQ ID NO: 4660 - DNA, 72 bp, Homo sapiens
ccacaggccatggcatggagtgtgcaatggaaagtcgtaggagactttttttttttgacacggtctcacttt

SEQ ID NO: 4661 - DNA, 72 bp, Homo sapiens
aggattcaggctatggaaaccggctcgaggtcaggcggcgtggagttgccagggctgcggttctaagacaag

SEQ ID NO: 4662 - DNA, 72 bp, Homo sapiens
gaaattacgcgggcatgagtcagcgcatccctacgcgccctccgccccttgagggtgggtcgcttataggga

SEQ ID NO: 4663 - DNA, 72 bp, Homo sapiens
gccctgaaatgggccaagatggcagagggcagcctcgggcctctccttagtgccagagctcccagctgggat

SEQ ID NO: 4664 - DNA, 72 bp, Homo sapiens
tgctgccttccccaggagagctgagctttcagtctcgtccctcttcctcctccccaacgagaatgcacaaga

SEQ ID NO: 4665 - DNA, 72 bp, Homo sapiens
tactagggctgcagtaataaaggcttgcctagagccggaggatctctgccaggaactgctcactcatatggc

SEQ ID NO: 4666 - DNA, 72 bp, Homo sapiens
tcagggacaaggatgcgccctgagggggcgttgcccggagtgctcgggccgccaagggggcgggctggcggt

SEQ ID NO: 4667 - DNA, 72 bp, Homo sapiens
agcggggctctcattaagagaggcaggctgcgtcacggcagggcagtgctaattggatgtggttgaaggctc

SEQ ID NO: 4668 - DNA, 72 bp, Homo sapiens
cttcaggctcctgtctttctcttacaggaagattacgacaaagcagaaacagaggcatccaaaggtagggga

SEQ ID NO: 4669 - DNA, 72 bp, Homo sapiens
gtcaccattatcgaagcgttttgaatgtgtagctgcgacctaaataacttcccagaggtaaatgcatcctgt

SEQ ID NO: 4670 - DNA, 72 bp, Homo sapiens
aaggaggagctgtttacaaacaggatgtctgattacggagttacaccagtggccagattggatcagatattt

SEQ ID NO: 4671 - DNA, 72 bp, Homo sapiens
gtcccgagttggctgccttccctcactatgtagcccggggctctgtgctcatacatactttacccaggagct

SEQ ID NO: 4672 - DNA, 72 bp, Homo sapiens
ggagtggtgcccagcactcttttgacaagaccttccgtgatgctgatccttccttaagtttgagaaccaatg

SEQ ID NO: 4673 - DNA, 72 bp, Homo sapiens
tgaggcaccatggaggaaatacaggccctacggggcggctgcacgagcatctgacatcagtcagctccccaa

SEQ ID NO: 4674 - DNA, 72 bp, Homo sapiens
ctcaggctgtggggggtcaggggtcgaggcccgcgcggcgcgcaccttccaggcgcatccccaccgtcaggc

SEQ ID NO: 4675 - DNA, 72 bp, Homo sapiens
tccctccctccagcttgccacagcttgctcctgagcgactcctatatatggaaaagcgaaagtgcctgaaaa

SEQ ID NO: 4676 - DNA, 72 bp, Homo sapiens
gtgagaagggccgagaaacgcggaggtggtgtgaacgaatggaacagcagccgctgtgtcactgagtattac

SEQ ID NO: 4677 - DNA, 72 bp, Homo sapiens
gattaaaatgagtcatggccattcctataaaggaacgctttctaaggggaatgctgtgggtttgagctgctg

SEQ ID NO: 4678 - DNA, 72 bp, Homo sapiens
attctaggtcagatttagaccaaagtgagactctacagtcacccagtaacatgggcttataaagatggctca

SEQ ID NO: 4679 - DNA, 72 bp, Homo sapiens
aaacgagaccatgaaattgtcttgctagggtttagcgggggatgaccaactcagattgtgcactaacacaca

SEQ ID NO: 4680 - DNA, 72 bp, Homo sapiens
ttttaagccaaggttcactctctactccctcgtcacgcgtcccaacttctcatccagaacccacccctcttg

SEQ ID NO: 4681 - DNA, 72 bp, Homo sapiens
tcacgtggcatgtgccgcactgagacaggcaggcacgcagctgaggggctggcggtgggaggggcagggccg

SEQ ID NO: 4682 - DNA, 72 bp, Homo sapiens
cggacatcctgcattcctggccgcttggcgccccacggaccgatggacagacagcactgcagccacagagcg

SEQ ID NO: 4683 - DNA, 72 bp, Homo sapiens
tagtaggccgtgctgtagacgacaggcaccgaggccgcctcctccagcgtcctggggatgcagcaggtgggt

SEQ ID NO: 4684 - DNA, 72 bp, Homo sapiens
gaaaatgcattaaggaatttataggttgtgaaatccgtattgagcgattagcacaattatggagagtccctt

SEQ ID NO: 4685 - DNA, 72 bp, Homo sapiens
gtgtcttagcagtgacttaactaaaataaacatgtcgaatgtaaatctgggaagtaccactgggctttcaat

SEQ ID NO: 4686 - DNA, 72 bp, Homo sapiens
cagccttttgaactaggaattgagaagcttggatccgatccctatttcaccacttcctgtattagcttgatg

SEQ ID NO: 4687 - DNA, 72 bp, Homo sapiens
gtgggcacagacgtgatgcaaggaggacaaggtgacgcttccacaagccaaggaacctggaggatactggcc

SEQ ID NO: 4688 - DNA, 72 bp, Homo sapiens
gatacctcctctgtggaaagaactggccacacatccgcagaggtgactcgggctgagaacccaggctcctcc

SEQ ID NO: 4689 - DNA, 72 bp, Homo sapiens
aacaattatgagccctgatatgagccaacttcttccgtcttatcccctttgaggacgctctgttatcgcccc

SEQ ID NO: 4690 - DNA, 72 bp, Homo sapiens
acgaggggtgattacctgctctaaggtcgacaccacgcttgcttgatagttgaccgtgccttagttttcccg

SEQ ID NO: 4691 - DNA, 72 bp, Homo sapiens
cagtgaggcaaaacagttcttaaagcataaagtggcggctactaaagcaatgcaaccgaggccaggcatggt

SEQ ID NO: 4692 - DNA, 72 bp, Homo sapiens
aacggacccttggctacctagggggtcggatctgccgtggctaccctttcccccaccctgcccccaccagag

SEQ ID NO: 4693 - DNA, 72 bp, Homo sapiens
ttttgaagacaaaacgcctctgagagtaactggaacgttctgtttgcctctagccaacggcagaaaagcgga

SEQ ID NO: 4694 - DNA, 72 bp, Homo sapiens
cacccagacaaaccctcattcacatcagaacaaagcgctagttatgtgtgttgaaattccttaaagaaaatg

SEQ ID NO: 4695 - DNA, 72 bp, Homo sapiens
gaggtaaaaactcacaagctgtttcttctctgaaccgcagaaacaaacctggttgcagttggggcactgtgg

SEQ ID NO: 4696 - DNA, 72 bp, Homo sapiens
gtgctctgcgccacgtggagaaacagaagtcctgccgagggctgaagttgatgtaccgctacgatgaggtca

SEQ ID NO: 4697 - DNA, 72 bp, Homo sapiens
tgtgagtgggaggcttgccaagagaaagtccctgacgcaggggtttcccaacacatgatgaagccatcttca

SEQ ID NO: 4698 - DNA, 72 bp, Homo sapiens
tgcgggaggaggtgaccttcatctatcagaagctccgtgagttcctggagcccacagccggtgtgtggggag

SEQ ID NO: 4699 - DNA, 72 bp, Homo sapiens
aggacacaagccctggcttcatggctcagtgttaacgttatgaaggagaggtgactatacccagcttcctta

SEQ ID NO: 4700 - DNA, 72 bp, Homo sapiens
ttagcagaccacttgaactaataggaggaggatgacgcagaactcaagtgaagtactgtggtcatttgcaga

SEQ ID NO: 4701 - DNA, 72 bp, Homo sapiens
tgagccaaggttgcgccattgcactccagcctggacgacaggagtgaaactgcattgcaaaaacagcaacaa

SEQ ID NO: 4702 - DNA, 72 bp, Homo sapiens
tgccaccaaaacaaaaagtgccaaaatagcactgtcgtacacagctttgttacctaagagactgaaatgtag

SEQ ID NO: 4703 - DNA, 72 bp, Homo sapiens
acaaaggaacaaagacaaatttcccaggttgcagccggcagtcagaagccagaagccaccaaatagctccct

SEQ ID NO: 4704 - DNA, 72 bp, Homo sapiens
agcagcttgtctgataaactaagctatgtatgattcgctgccagtacagactgaaaaacaaaataaactccc

SEQ ID NO: 4705 - DNA, 72 bp, Homo sapiens
aatcctcctgtctttggccaactccccatccttggcggagcgctcgcccttggccgggctccgtgctgccag

SEQ ID NO: 4706 - DNA, 72 bp, Homo sapiens
gctgggattgaaccagggcaggaagcatggggggccgggagggcacccagtgggccaacacgtctttcccct

SEQ ID NO: 4707 - DNA, 72 bp, Homo sapiens
ccaccagacttctgggcatcagcagctggtcacaacgtccttcaaggcattcattcctgcaatttttttttt

SEQ ID NO: 4708 - DNA, 72 bp, Homo sapiens
gacctcgcgacttttactcccccgaccccgatctccgactcctgactttggaagcccccaaagctgcttttc

SEQ ID NO: 4709 - DNA, 72 bp, Homo sapiens
gtggggctcaggcttttccttgccatctccaggcccggctggacattttgaagattcattctcggaagatga

SEQ ID NO: 4710 - DNA, 72 bp, Homo sapiens
ccagccctgtccccggctgcccccacatccacatccggataagcgcacactttggagtccaagcgcccacct

SEQ ID NO: 4711 - DNA, 72 bp, Homo sapiens
aacctctctttttaaatacctgatcagttcacagacgactttggccccttctcatataatacatgacttcct

SEQ ID NO: 4712 - DNA, 72 bp, Homo sapiens
tgaaaccagttggtcacccagggaggccaaagccccgggaggtgccaggcctgctttgtgccagggtgacat

SEQ ID NO: 4713 - DNA, 72 bp, Homo sapiens
gaataaatgagtgaatgaatgaatgaacaaatactcgctctgtgctcctcctagggacccggatgccccact

SEQ ID NO: 4714 - DNA, 72 bp, Homo sapiens
ttgctgtttgactaaggccagatttccctcatgtacgtgttttgtttttgatttatcaaatatccatcttga

SEQ ID NO: 4715 - DNA, 72 bp, Homo sapiens
agcaatcagcgctgcaatcctggcggttacctcagcggcggcgtctctctctgcgcctcacactcgcagccc

SEQ ID NO: 4716 - DNA, 72 bp, Homo sapiens
tgggggaaggcaggctgttgccatggtggcctgagcgagcagaattcctccagggtgaagtgggagatattt

SEQ ID NO: 4717 - DNA, 72 bp, Homo sapiens
caaattctggctttctattgcatcatggtcacttacggattcttcacaacctcccctcccccttgtcctcac

SEQ ID NO: 4718 - DNA, 72 bp, Homo sapiens
gctaagtgactcatcacccacagagccccagaggccggctgtttgcagctggaactgggtctcctgagatcc

SEQ ID NO: 4719 - DNA, 72 bp, Homo sapiens
ctggatgtaagttccttcccccgctagttggggcacggaagaccctagcattcctggtgggtagaaggctgg

SEQ ID NO: 4720 - DNA, 72 bp, Homo sapiens
agagagcaactctggcctccccagagatcctgcagcggcaccgcctgagcaagcatccagcccttccaccag

SEQ ID NO: 4721 - DNA, 72 bp, Homo sapiens
agactacccacaatctccccaccgcaggactgaagcgaggctgaaatcttagaatcaaccccacggaatgaa

SEQ ID NO: 4722 - DNA, 72 bp, Homo sapiens
gatttcttcctcactttatttgctcacttctgtcacgcatttaaaatgtcacagagaccaaaatagagtggc

SEQ ID NO: 4723 - DNA, 72 bp, Homo sapiens
caagcttggaaattacaacatatatgtaccatgaacgcgaagtacctgagctcaaagcagttgagcaatctt

SEQ ID NO: 4724 - DNA, 72 bp, Homo sapiens
atgtaaatactgataatctcacacagttagatcaacgttattggcttgactcagtccacattctgtaaggga

SEQ ID NO: 4725 - DNA, 72 bp, Homo sapiens
acctgggaggcagaggttgcagtgagccaagattgcgccattgcactccaatctggggaacaagagcaaaac

SEQ ID NO: 4726 - DNA, 72 bp, Homo sapiens
gggtatcgtgccttaatttaccaggtgacaggcaacgctgccctctcctggaaccatccagcagagccaggg

SEQ ID NO: 4727 - DNA, 72 bp, Homo sapiens
agagatggaggacctgcgggagttaggatggggggcgggttctgcaggacagctcgcctccctgaggcttcc

SEQ ID NO: 4728 - DNA, 72 bp, Homo sapiens
gtgggaagctatgcctcctccgagatgttgttcttcgtacgttttcaaccatacagcggcagcgactggagt

SEQ ID NO: 4729 - DNA, 72 bp, Homo sapiens
cagccgggctcagcgcgctcctcaccgcgctgcaccgccagctctgggcacagaacttggggctcacacagc

SEQ ID NO: 4730 - DNA, 72 bp, Homo sapiens
gctgtgaacgttagtcaaggtcttttggaggctatcggcagtcttccctgtgaaagcaaaatgtgctgtaat

SEQ ID NO: 4731 - DNA, 72 bp, Homo sapiens
tcctctgtggtttggcaactgtcctgcccggcctacgtcctgtggctccggctgaagcctgggacctctgga

SEQ ID NO: 4732 - DNA, 72 bp, Homo sapiens
ctgagcggacgcatctcgacgctgaaagatgagaccggagcagtgagtcggacaagaactgaaatgggatgg

SEQ ID NO: 4733 - DNA, 72 bp, Homo sapiens
ccgggtctgagggaagctttgccaacagcctggcccgtgactgatcggaattgcctaatctgaattccagac

SEQ ID NO: 4734 - DNA, 72 bp, Homo sapiens
cccagtgggaggagggccatggggtggggacctgacggggctgcccacggagggagcaccactgctgcattg

SEQ ID NO: 4735 - DNA, 72 bp, Homo sapiens
atatcatggtatagtcgtcaaagctaagaaaccaccgctgacacattacttttaactgaactgcagatttta

SEQ ID NO: 4736 - DNA, 72 bp, Homo sapiens
ggaggcggcgggtgtgtggctataaaaacgcaacccggggggtgcctgtgaaggaaatctgcgtcccgcaga

SEQ ID NO: 4737 - DNA, 72 bp, Homo sapiens
taataagtagtaagtaattgctacttgccagacaccgttctgagggcttcttgtatgttaactcatttaatc

SEQ ID NO: 4738 - DNA, 72 bp, Homo sapiens
gtgatttcctgttgtgaaatccaaagaaggagctccgttttatggcaggatcgacatggtctaggagcagaa

SEQ ID NO: 4739 - DNA, 72 bp, Homo sapiens
ggaagtgttacaggttgtacacagaacgtgcctaccgagatgaaatgctgaccaccaacgtgccggaaatcc

SEQ ID NO: 4740 - DNA, 72 bp, Homo sapiens
ctggcacacccccaggtagatgccctgcccgttaacgcccaagggcaggggcttgagtgactcatgtgggcc

SEQ ID NO: 4741 - DNA, 72 bp, Homo sapiens
gtgacacaacatcctggggttttcatcagcattctcgcagccactgagaaacaccctgtgttcctgtttgca

SEQ ID NO: 4742 - DNA, 72 bp, Homo sapiens
tttgtgcatttcgttcgagcaatgactcattctgtcgcccaggctggagtgcaggggcatgatcacggctta

SEQ ID NO: 4743 - DNA, 72 bp, Homo sapiens
ccttcaagggctggagtcagttaggtaacaggccacgggccccgggctcaggccactgcacggacccaggga

SEQ ID NO: 4744 - DNA, 72 bp, Homo sapiens
acggtcaggtcagaccccgggatcgggtgaaactccgttcacatttgcatacaggcggagtctcacaatgaa

SEQ ID NO: 4745 - DNA, 72 bp, Homo sapiens
gtgtttggcattctccgtcatcattctggccggggcgggcagttctaggagttggaactcagtcctggtgga

SEQ ID NO: 4746 - DNA, 72 bp, Homo sapiens
agaaggagagacaccaaaggggcaggaagctggcccgttcttactagtaatggtacctgtgacatggacaac

SEQ ID NO: 4747 - DNA, 72 bp, Homo sapiens
ggggttcaatcacatagaacataaacctagccatgcgtaagcctcccggaacagaggctctcctgattcaca

SEQ ID NO: 4748 - DNA, 72 bp, Homo sapiens
cagagggtgagcacctctcgatgagtagtgcctgccgggagggcggaatctggaagatgagctggtgcagta

SEQ ID NO: 4749 - DNA, 72 bp, Homo sapiens
ttgaccagccaacaagagacgggggtgggcccaggcgcccaggagccagtaggatcgcagcagaggcattgg

SEQ ID NO: 4750 - DNA, 72 bp, Homo sapiens
taggaaccttggctctctggttctccaatgtacatcgaaggcgtggcataatgccaggtccacagtagaagc

SEQ ID NO: 4751 - DNA, 72 bp, Homo sapiens
ctttcttctctctccagttctaggctttgtctccccgcccaccgcccccctgcccccccacccccccactgc

SEQ ID NO: 4752 - DNA, 72 bp, Homo sapiens
ctgcacagcttgggctgctagctggcgcggggccacgcgcctgtctgtactgcccagccgccgggagtgcca

SEQ ID NO: 4753 - DNA, 72 bp, Homo sapiens
acggggcgaggctgtgaggacgggttttggagcgccgctcggccgtcctcaaaactttggacacaccctccg

SEQ ID NO: 4754 - DNA, 72 bp, Homo sapiens
gttgcctgttccagaactacatggaaatggaaccacgcagctgtgctcttctgctttttggcctgaatactc

SEQ ID NO: 4755 - DNA, 72 bp, Homo sapiens
gtttttggttcatttcactgtcctgtcttagtcaccgtattacaaaccatgttgacccagacattaaaaacc

SEQ ID NO: 4756 - DNA, 72 bp, Homo sapiens
gccctcttccctaggttcgggccagcaggaggtgccggctggagtctccaccatagactcagtggcctggcc

SEQ ID NO: 4757 - DNA, 72 bp, Homo sapiens
ctcacagcaaggcatcctagaaattgggatgtgtccgggagcatctggagtgaccacccaggctgactcatt

SEQ ID NO: 4758 - DNA, 72 bp, Homo sapiens
tgctgcgctgcttctctttgagtcatctgggtcctcgcctgttgactttcttcctggtagatgtggactgac

SEQ ID NO: 4759 - DNA, 72 bp, Homo sapiens
caacttaattttcaagtaatattaactaatacggccgggcgccgtggctcatgcctgtaatcccagcggttt

SEQ ID NO: 4760 - DNA, 72 bp, Homo sapiens
aaatgaacaaatttttaatgtactttggaaccctgcggattgcacagatactaagcattgtgaaatagggca

SEQ ID NO: 4761 - DNA, 72 bp, Homo sapiens
ccatgaggagggagcccacaggccaagtcagcacccgcccgcccctagtccccagcacaatgctaagttgca

SEQ ID NO: 4762 - DNA, 72 bp, Homo sapiens
gtggttggactctctgtgtgagctcagtgtttcctcgttcgcttagaccagcagatcctttaaccaccagag

SEQ ID NO: 4763 - DNA, 72 bp, Homo sapiens
cagcctgatggaggcagcttaaacaaacacacgaccggagtggcgcaggagttataaagtgccatatgtgaa

SEQ ID NO: 4764 - DNA, 72 bp, Homo sapiens
ctccaggagatgcggcccaggagctgagaacacgtcggctccgggagaggacagggcttcagggaccttagg

SEQ ID NO: 4765 - DNA, 72 bp, Homo sapiens
ttagacatttggagggaagggtagggggacatgatcgagtgaagttttgaaggaaaagaaacctccctagtg

SEQ ID NO: 4766 - DNA, 72 bp, Homo sapiens
ggggagaggaggccccagcaggctggatgctgctacggggagtgacggtcacccctgtgtgtccagagccca

SEQ ID NO: 4767 - DNA, 72 bp, Homo sapiens
ggggttttctttgcgggtaatgaagatgtttagcacgtagacagaggtggtgtttgcacaatgtgcatgtct

SEQ ID NO: 4768 - DNA, 72 bp, Homo sapiens
cagccatcagattcgtcctttccaattctgtcaaccggtttgcttgatgtcaaagctagcagttttgtgtgg

SEQ ID NO: 4769 - DNA, 72 bp, Homo sapiens
gggaagacggtctgagccagaaccgacccagggctcgcgagttggcccacaattcccagtctgcattcgagc

SEQ ID NO: 4770 - DNA, 72 bp, Homo sapiens
gcaagcgtgagcccaacaaacaaacaccaggtctgcgctggccgaagacgaagcgtcctccctggaggtggg

SEQ ID NO: 4771 - DNA, 72 bp, Homo sapiens
ggctctgcccttccccagggagccgtcacaccgagcgcagggcagtcagccctcactcagccgtgtggacgt

SEQ ID NO: 4772 - DNA, 72 bp, Homo sapiens
tgtcacccatgaaaatgtgacagcacccgggaagacgtgggcagcacagacaaacccagcccaaccgagaca

SEQ ID NO: 4773 - DNA, 72 bp, Homo sapiens
agtaggggcaatggtgtgctggcagactggccctccgaaagaagaaaaggaaggaaaaaaaaaagcaagcaa

SEQ ID NO: 4774 - DNA, 72 bp, Homo sapiens
agtatgaatgagtctccgggtactttgctcagtaacggactggaccagcgcggcctccacgccagggactgg

SEQ ID NO: 4775 - DNA, 72 bp, Homo sapiens
cttcaccccaccttagacttcctggaagggccgcccgggtccacaacctggcccgttaactccctgggcagc

SEQ ID NO: 4776 - DNA, 72 bp, Homo sapiens
gtccaacatcaaggaatgatcaagaactcccatcccggttccacgctgcgcgtccgccatccgaaccggcct

SEQ ID NO: 4777 - DNA, 72 bp, Homo sapiens
tgtggtctgggcaagttgtcagccctggtcactggcggcctggaaatagacagtgctgttgtggggcctggt

SEQ ID NO: 4778 - DNA, 72 bp, Homo sapiens
cctgtcaggtcagcggcgccttatccatcgccccacggtggctgcatgtgcgtatgtgtgtgggtgtccaca

SEQ ID NO: 4779 - DNA, 72 bp, Homo sapiens
aatcaaaacgtggaagttcgttcatcctcccaactcgtggagttctaaggcagagactggctaagcttttgt

SEQ ID NO: 4780 - DNA, 72 bp, Homo sapiens
ctgccaaaggttcttccagaaatgcagcagttagtcgtatttctcccacttcacttctaacttgtctttcaa

SEQ ID NO: 4781 - DNA, 72 bp, Homo sapiens
cttttccatcactgctggctacaagtgtttgcaaccgcctcttgctccgtgtgagttctttcctctttgttc

SEQ ID NO: 4782 - DNA, 72 bp, Homo sapiens
ccagctccacctgcctgggccttcccacctctgggcggggatggtgaccgcaccctgaaatcccagagtcag

SEQ ID NO: 4783 - DNA, 72 bp, Homo sapiens
actactaatcaggcagcatgtctagaatgttaagacgatgattattaatcagtggccaaccaagaaaactga

SEQ ID NO: 4784 - DNA, 72 bp, Homo sapiens
gcccaatatcacacaggaagttgaggggatacagccgggtctcctgactcctagtcacagctctcttcacca

SEQ ID NO: 4785 - DNA, 72 bp, Homo sapiens
ggggcagggctccctggaacctccacaccattccccgggttcccggcagctctgggaaagcagagctggggc

SEQ ID NO: 4786 - DNA, 72 bp, Homo sapiens
gagcatctggtccgtggccagctgctgctcgatgacgtcatccccgtagatggccacgatggccacgcagat

SEQ ID NO: 4787 - DNA, 72 bp, Homo sapiens
gcggtgtctgtgactgagctgtgcactgtctgtgacggtgagctgtgcggtgtctgtgacggtgagctgtgc

SEQ ID NO: 4788 - DNA, 72 bp, Homo sapiens
ccgcctcctctctgggggacgtacctgagcgtgtccgcctcctccctggagaacaggaagctctgttcggca

SEQ ID NO: 4789 - DNA, 72 bp, Homo sapiens
ggtgggggctcctagctgtggctgggggctccaggcgcccctgtgattacctcctactgccaccatggcgct

SEQ ID NO: 4790 - DNA, 72 bp, Homo sapiens
acaatagccaggcgaagaaactacaactcccagggcgtcccggagcaggccaacgggactacgggaagcagc

SEQ ID NO: 4791 - DNA, 72 bp, Homo sapiens
gaacttcccactttgtttcaggacagccagcagcacgtccctcccttcctctgggtttgtagttgtttgttt

SEQ ID NO: 4792 - DNA, 72 bp, Homo sapiens
gctagctggggtcgtcgggggatccccagcggtgacgccattgaaaagggtgcgctctggcttccaaatagc

SEQ ID NO: 4793 - DNA, 72 bp, Homo sapiens
aggcttgctgtgtgacctcaggcagaacccctgctcgctggggcctcagtctcactgtctgtggcagtgggg

SEQ ID NO: 4794 - DNA, 72 bp, Homo sapiens
cacctctctccctctctctccacagagggagataacgctgtgctgcagtgcctcaaggggacctcagatggc

SEQ ID NO: 4795 - DNA, 72 bp, Homo sapiens
ttccaaagcccgggtggctctttgaggtcaagtggcgtggtgggggtggggaggggaccgccctgaccgggg

SEQ ID NO: 4796 - DNA, 72 bp, Homo sapiens
gtaggcctctgcttgctagttgtatccactgtttacgttatagagaaatcttttcacatatgtaaggacttt

SEQ ID NO: 4797 - DNA, 72 bp, Homo sapiens
tgacgggcgagaatatccccggtgatttggacacacgcacctcttcctggcggggtatttgattaaggaaga

SEQ ID NO: 4798 - DNA, 72 bp, Homo sapiens
cgggaggtaccggcccgacccctagctctggcttacgcaaccccacagatgtacatttcgctgcatctgagc

SEQ ID NO: 4799 - DNA, 72 bp, Homo sapiens
gctgagctaattagctcgaaaggctggctgacaggcgggttcccattgctttcttctgttaaacacacccac

SEQ ID NO: 4800 - DNA, 72 bp, Homo sapiens
gctacctaagaacacacgaacacaatgtggacctacggccctgttattccagcttggaaaaaaaaaaatcac

SEQ ID NO: 4801 - DNA, 72 bp, Homo sapiens
ttcctgttgcccatttcacaattctgctgtatccccgcttccctatccccacaccctctcctgcagccatgt

SEQ ID NO: 4802 - DNA, 72 bp, Homo sapiens
gaccctcaggactcaccaagacagaagagggcggtcggggatggagacatggttcctcagccctgtcctgag

SEQ ID NO: 4803 - DNA, 72 bp, Homo sapiens
ttttacaagtgacggtttccccggctccctcctgccgccatgtgaagaaggtcgttgcttccccttcacctt

SEQ ID NO: 4804 - DNA, 72 bp, Homo sapiens
ccgtccgcggcctgctgctccttctctctgcaggccgctgctcagccggccctgctgcctgggcggccactg

SEQ ID NO: 4805 - DNA, 72 bp, Homo sapiens
cagagatttttgtcttgtttactgctgggtcataccggaactgcttggtaaacatgtctttgcatgaatgaa

SEQ ID NO: 4806 - DNA, 72 bp, Homo sapiens
tcacagataacgcaacttcgcctgactgaacccggcgtggggagactgcagagatggcgctctgcagccaaa

SEQ ID NO: 4807 - DNA, 72 bp, Homo sapiens
gccatcacgtctctaactggacaggtgctggaaagcggggttgggggagtgggggaatgcaccctccctgct

SEQ ID NO: 4808 - DNA, 72 bp, Homo sapiens
caggccccaggagcaggagccagccagaggctttgcgaggcaggcctcgcacagtgaccctgttgatgtgcc

SEQ ID NO: 4809 - DNA, 72 bp, Homo sapiens
tgaaagacagggctttgatatcctgccccagagcccggctgttaccacatggtttgatttgcgatgccaagc

SEQ ID NO: 4810 - DNA, 72 bp, Homo sapiens
ggaacggaaaacaagttctgcatattttatatacacgaggtctgtgatttcaaaaccactgcggggaggaac

SEQ ID NO: 4811 - DNA, 72 bp, Homo sapiens
agttcaagaccagcctgggcaacatactgagaaaccgcatccctacaatttattagaggctgaggagggagg

SEQ ID NO: 4812 - DNA, 72 bp, Homo sapiens
gctcctggcgcaggaagccacagtggcctccgtggcgactgagcaggaggaagaagtaggggttgctgtgga

SEQ ID NO: 4813 - DNA, 72 bp, Homo sapiens
gactggggttggggctgggactggggcctggctggcgtccgccccctcccactcgttgctctccggccagca

SEQ ID NO: 4814 - DNA, 72 bp, Homo sapiens
aagagagcacagagctgcgtgcattctccctgtgccgcgacctgtatccaaaagcctcagacgagacttgag

SEQ ID NO: 4815 - DNA, 72 bp, Homo sapiens
gaacttaaccttcaaattgcagtatggtcttttctcgctttttcctttctctcttccctcccccctttccct

SEQ ID NO: 4816 - DNA, 72 bp, Homo sapiens
cccccacccttgccaggagcttcacaaaccagagacgggctgtcagcaagagctcagacaggatgtggtgca

SEQ ID NO: 4817 - DNA, 72 bp, Homo sapiens
tgcttgaagggtttaaataataaattaggccctgtcgtgccattatgggggtggtcataccctgtacccagg

SEQ ID NO: 4818 - DNA, 72 bp, Homo sapiens
aaaagtaatgaaaacttcaagggagtatccagattcgtggactctgactcaaaaagctcttgtcttggttac

SEQ ID NO: 4819 - DNA, 72 bp, Homo sapiens
tgaacactccatttctaaagggaggctcttgtgcacgctgtgaggagacgttccccaggaaagttcaagtga

SEQ ID NO: 4820 - DNA, 72 bp, Homo sapiens
cagtctcattgggaagggaaactgagcttcacggccggaagtgacgcaactctgcttgcccgtcattggcca

SEQ ID NO: 4821 - DNA, 72 bp, Homo sapiens
gagccctcctcccacctctcttggcctctgcttggcggccgtgaggccctgtggagctgacatctattgggc

SEQ ID NO: 4822 - DNA, 72 bp, Homo sapiens
aagaagagggcctcaaatgcctgactgagcgagtgcgagccacgggtgccaagcagagggaaccccttcaga

SEQ ID NO: 4823 - DNA, 72 bp, Homo sapiens
ggcttgggtctagagaatttctctctgagaaactacgcccccgggggaatcggcccccccagccctgcgcca

SEQ ID NO: 4824 - DNA, 72 bp, Homo sapiens
ggtgcggctgccccgggccccaggtgcggctgcaccgtgctgtggtgacagccacagcaggatcagagcagc

SEQ ID NO: 4825 - DNA, 72 bp, Homo sapiens
ccgatagtttcacactattcctatacctccaggtccggaagacaggtaaaaaattctataatgtaagaatgg

SEQ ID NO: 4826 - DNA, 72 bp, Homo sapiens
gagcgagcgggatggggcgtgggccgggcctcaggcgcaggcggccgttggcggttggagaagggggaaggg

SEQ ID NO: 4827 - DNA, 72 bp, Homo sapiens
cacaatggttatgcttcctcctcaacttcccaccccgtctgcaaaaggggaagaaatggacgctcacccaca

SEQ ID NO: 4828 - DNA, 72 bp, Homo sapiens
actgttccaaatctttaggattaaaacacctaactcgtgcgtatgtgttcacttctattgcatactatcggg

SEQ ID NO: 4829 - DNA, 72 bp, Homo sapiens
gggcaagggaatgggctggttagtggccaaggagccggggcccaggagaggcgcggggggtagatgggtggt

SEQ ID NO: 4830 - DNA, 72 bp, Homo sapiens
cagcctccggtgcgcgcaggccccaagcccacatgcgcagtcctcaccttgcgcgcagccccatgtacagcc

SEQ ID NO: 4831 - DNA, 72 bp, Homo sapiens
acagactcctcaagtgaatattaatccttttactccggattctttgttgcttcattcctcaggacagtgtcg

SEQ ID NO: 4832 - DNA, 72 bp, Homo sapiens
ccatttactgagatttgatccccaccacacggctccggggtgagaattatgacatctggctcaacacggctg

SEQ ID NO: 4833 - DNA, 72 bp, Homo sapiens
ctatttggtccccacaattctccctgttgtacaaacgaagatgctcagaggcccagagggtgggcaatttgg

SEQ ID NO: 4834 - DNA, 72 bp, Homo sapiens
tggccgagaggtggaggtcccccggcaggggcagtcgcctctctggcctgagccagaaactcccaattctca

SEQ ID NO: 4835 - DNA, 72 bp, Homo sapiens
gcgtgtaagcccccaggagtgcatgcgtgtgtttgcgtgcagtctacaaacatgttttcacaaagctcaagg

SEQ ID NO: 4836 - DNA, 72 bp, Homo sapiens
cttcccaaagtgctaggattacaggcgtgagccaccgtgctggcctggtaacaattattcttgaagttaact

SEQ ID NO: 4837 - DNA, 72 bp, Homo sapiens
acggggtcattcctccctgaggtccaggagaagggcgacctctgccagcccaagaagcggtgagaactacat

SEQ ID NO: 4838 - DNA, 72 bp, Homo sapiens
ccaacgacagccccgtgttgtcctcccggagcttacggttcagtaagggacacagacacgttcccagtgctg

SEQ ID NO: 4839 - DNA, 72 bp, Homo sapiens
gcagttgatgagagcaggaaccggcagggcacccccgcattcagtaggcactggcttctcagcagagataga

SEQ ID NO: 4840 - DNA, 72 bp, Homo sapiens
gccaagaaagaatgcatgaaagagacagagaagaacggtcagggaagtaggagaaccaaggcggtattttag

SEQ ID NO: 4841 - DNA, 72 bp, Homo sapiens
ccactggcaggaagttgatagccttcacctggtcccgagtcaggccccggtacctgatgcccccttcccagg

SEQ ID NO: 4842 - DNA, 72 bp, Homo sapiens
cccaaggggatgcggcttcagcaaagcttctcaaccgtccccatcccagaggggccctcctgcctcagacca

SEQ ID NO: 4843 - DNA, 72 bp, Homo sapiens
ggggcttgagccctgcccccttaggtcttcaggggcggggcggctgcagctggagcacagacctggactctg

SEQ ID NO: 4844 - DNA, 72 bp, Homo sapiens
ggcgggtcggcgctcgttcccgcttgttcttcccacgccactcggcatcttccaaatgactgttgtgttggg

SEQ ID NO: 4845 - DNA, 72 bp, Homo sapiens
aatgactgcagccaggtgtgtgtgattgggccccgcgacctttttcttaggcaaacagggctttgtggatgc

SEQ ID NO: 4846 - DNA, 72 bp, Homo sapiens
tgctggaattacaggcgtgagccaccgcgcccggccgaaagtttcgaatatccctttggcattgttctgttt

SEQ ID NO: 4847 - DNA, 72 bp, Homo sapiens
aagggctggtacagcagcaccttctggtacagggccggcttggagcggatgtagcacctcagcgcctcgtct

SEQ ID NO: 4848 - DNA, 72 bp, Homo sapiens
acggaggggccgcccgcttccccgcggggcgaggccggctctcccaggactggccacattgcagtcacgcgc

SEQ ID NO: 4849 - DNA, 72 bp, Homo sapiens
gcgaactgtcacacctgtgccactcgcccacaagccgcgcccacaattggccagctgggccgtgcacgtcag

SEQ ID NO: 4850 - DNA, 72 bp, Homo sapiens
gctggaaagttttagggcacagttgccctgtgcctcgcactagatgtggggcctttaaagaacttcccttta

SEQ ID NO: 4851 - DNA, 72 bp, Homo sapiens
tcccagacagctggggacaccctttccagcgggagcgggaggcgctgttgttcaggaaaggaagttgtgtgt

SEQ ID NO: 4852 - DNA, 72 bp, Homo sapiens
cgggacagggccttcctcagtcagccgggtggccacgttctgcaattctgctgaatctgctcactgtggaca

SEQ ID NO: 4853 - DNA, 72 bp, Homo sapiens
tagatgttcactgaccaaatactcctactagttctcgcaaaccaactgtctttcccatactctgaaacaatc

SEQ ID NO: 4854 - DNA, 72 bp, Homo sapiens
gaggtgaggaagtagagaccatggataaggctactcgcaggaagcctggctaagaacagggagtgagctaac

SEQ ID NO: 4855 - DNA, 72 bp, Homo sapiens
gcaggctcaagcctagagccggtttctgttagcagcggtgtttggctgttttatcaggcatttccagcagtg

SEQ ID NO: 4856 - DNA, 72 bp, Homo sapiens
ctctgtggtcagctacggggtgacgagagtggagtcggagaaatgcaacaacctctggctcttcctggagac

SEQ ID NO: 4857 - DNA, 72 bp, Homo sapiens
ctctctctctctctctctctttttccctgttcttgcgccagctgcctgacaatttgtgggattaaagctcta

SEQ ID NO: 4858 - DNA, 72 bp, Homo sapiens
tccactcccctctacacgttaccgtgtcccttctccggtggctctctgtgccttagccaggacaatctttca

SEQ ID NO: 4859 - DNA, 72 bp, Homo sapiens
cttcacaggtgacaaagccaggtcacatgcatgttcgtatttgaaggattcaatactcctgtctggcagaga

SEQ ID NO: 4860 - DNA, 72 bp, Homo sapiens
aactcctagagcccaccccgaccccacacacacctcggacccacccacgtccccaccccggcctggacctcc

SEQ ID NO: 4861 - DNA, 72 bp, Homo sapiens
tatctgcttgcccctgagcaaattacctaacctctcggagctcaagtttcttcacttgcaaaatgaactttc

SEQ ID NO: 4862 - DNA, 72 bp, Homo sapiens
ggccggacttgatctcttgggatccccactgggcccggcaaaagtgggtactgaccctgagccgcagcgcta

SEQ ID NO: 4863 - DNA, 72 bp, Homo sapiens
aggacaaaagcgatgctcaattccatttccgggcgcgacacagctccggcagggggcgctgggctctggagc

SEQ ID NO: 4864 - DNA, 72 bp, Homo sapiens
ctgctggaaccctgacgtgcagcaggcccaggccacggttcgcggagagcgtcgggcgctggtcctcaagat

SEQ ID NO: 4865 - DNA, 72 bp, Homo sapiens
tcaaaaaaaaaagcaaaagatactaccaagccctgcggagcaaggtacctcacacttcatgagcgagttaag

SEQ ID NO: 4866 - DNA, 72 bp, Homo sapiens
ataggctggagtcttcagctcacaaacttcttccacgttcccgattacccacctcatccaaagtctcttgag

SEQ ID NO: 4867 - DNA, 72 bp, Homo sapiens
atcaaaatctggcactacaacactggccctcatcacgccgccacaaattgcgagggatagaagaaagctgca

SEQ ID NO: 4868 - DNA, 72 bp, Homo sapiens
taaagataagtcacattttggagtctgttcttccccgtgtgtgtatgagttgggggtggggggagggagggt

SEQ ID NO: 4869 - DNA, 72 bp, Homo sapiens
aagccaagcagaggctactgcagtcctgatgtggacgaaggagattgctgctacaaagggtgctgctctgcc

SEQ ID NO: 4870 - DNA, 72 bp, Homo sapiens
tgctccctgtggcctgcactccctccccactccctcgttttgtatattccttgggcaagggctgagtgcctg

SEQ ID NO: 4871 - DNA, 72 bp, Homo sapiens
ccctggggagttctgacatgccccagggcgggggccggggcctgactctgaagttgcgtggcattgcgacag

SEQ ID NO: 4872 - DNA, 72 bp, Homo sapiens
gcgagagcggtactgcagacgcgggtgtcaagagtcgccccacccggtggctttgctgtaaatgttcactga

SEQ ID NO: 4873 - DNA, 72 bp, Homo sapiens
agcccagtccttggtttttccctgcttcctgcgtccgctccttcagggtgataaactcagggaaattaaagc

SEQ ID NO: 4874 - DNA, 72 bp, Homo sapiens
gtctcctcggaaacttcagtcgactctggagagggcgggagagatgcccaaccccttaaaggagaatacaca

SEQ ID NO: 4875 - DNA, 72 bp, Homo sapiens
aggtgaagggaagtggcagccactttcataaggatcgtgaacccttagacttactgacagacagttggcacg

SEQ ID NO: 4876 - DNA, 72 bp, Homo sapiens
cagccacaccccttcccagctccctgggctcttcacgtggtggctggccactcaaccccacccctgggcttg

SEQ ID NO: 4877 - DNA, 72 bp, Homo sapiens
ccatgacctaatacggagaagaggagaaggcaggacgtcaccgtccccaggccctcccaggcagccaccacc

SEQ ID NO: 4878 - DNA, 72 bp, Homo sapiens
gtcttcagcttacattctcctacttcttatatcaacgtcgtatcaagcattgagaaatgcttccatttgagc

SEQ ID NO: 4879 - DNA, 72 bp, Homo sapiens
ctttcttcctcaatgatgtataaacaaagccatcacgatccacttgctaggcgacttgcacaatgagtttca

SEQ ID NO: 4880 - DNA, 72 bp, Homo sapiens
tcgcaagccctggtgtggtgggtgctggaggcacccgcaggcaccccggtggcatggtgaccttcgagcggg

SEQ ID NO: 4881 - DNA, 72 bp, Homo sapiens
agggtggcggcggggacctcccggggctgcggggccgggcgcactcacatttgcctttggggtcccggcaca

SEQ ID NO: 4882 - DNA, 72 bp, Homo sapiens
cagggcggggttgaggggcttggggatgaggaggacgggcagcagccactggaggcaatacatgatctctgc

SEQ ID NO: 4883 - DNA, 72 bp, Homo sapiens
cgctatgccagggcctgctacttcatttgtttcagcgattaaaccagcacgacagggggctggaggcaggta

SEQ ID NO: 4884 - DNA, 72 bp, Homo sapiens
cactgggctgggcctcatgtcacttgcctgacatccgattgtgaaagatgtcacccagaggcgggcagaggg

SEQ ID NO: 4885 - DNA, 72 bp, Homo sapiens
ggaaccccagagtcatgagggttggggtggagcttcggggaactccagaattcgaataccccagccttctgt

SEQ ID NO: 4886 - DNA, 72 bp, Homo sapiens
aacaggcttttatgtgggtagagaggacacagcttcgtcaagcccagacctggaccctgcccatcaacaacc

SEQ ID NO: 4887 - DNA, 72 bp, Homo sapiens
ccgggctcttcccgccgcgcgctgattctcccaggcgtcctctagcgctactgttctgctacttccctgggc

SEQ ID NO: 4888 - DNA, 72 bp, Homo sapiens
gctgattgaattcctgaatgagttgaatggcagcacgatagcaataacatctgaccagcctaccataggtgg

SEQ ID NO: 4889 - DNA, 72 bp, Homo sapiens
ggggtgagggtgccgggtgcccctctgcactcattcgcaattggaacaccaggacttttttagaaagtagtt

SEQ ID NO: 4890 - DNA, 72 bp, Homo sapiens
aagattactcatccctggagttccttctcctcttccgagtgcagctaggtcctgggattggccagggggatc

SEQ ID NO: 4891 - DNA, 72 bp, Homo sapiens
ttcctcttcgaagaaactttaagaaaatatgttcccggccgggcgtccgccgccccatctgggaagtaagga

SEQ ID NO: 4892 - DNA, 72 bp, Homo sapiens
ctgggtgctagcagggtgtggcctggtctggcctgcggacagatggcttcctttttccctcccacacagacc

SEQ ID NO: 4893 - DNA, 72 bp, Homo sapiens
gaatgggcatgtagttatttctctcaccctttaaacggccagggtttcctcagctgcaccttcccaacaccc

SEQ ID NO: 4894 - DNA, 72 bp, Homo sapiens
ccctgctgctttagtgaatagttcacacccgttttcgcagcggagatgtcggccactgggaagaatcaagga

SEQ ID NO: 4895 - DNA, 72 bp, Homo sapiens
actgctggctgcagattgcatgctcttggggcagacgccctaagaatgtgtccaccgagtccaatgtgtctt

SEQ ID NO: 4896 - DNA, 72 bp, Homo sapiens
acagaagccacagccaagacctgactaaggctgctcgggcaactaaaacagctgggaagctgctggaaggag

SEQ ID NO: 4897 - DNA, 72 bp, Homo sapiens
cccagtgtttcttatcaatgggacaggtcttctgtcgtcacaggcttcaccacaccagcctgtttttcacat

SEQ ID NO: 4898 - DNA, 72 bp, Homo sapiens
caaggatacacactgtcaaaggttcccataacacccgtggggcaaaacagaccaggctgcagggaggtggtg

SEQ ID NO: 4899 - DNA, 72 bp, Homo sapiens
atccttgttttgaacaagacacagcaggaccctgccggggaggttggggcagagctgtgacttggctgcagg

SEQ ID NO: 4900 - DNA, 72 bp, Homo sapiens
tgcagaaaatatagcagaaagcggaatacctcttgcgaatccttccgcactaggaagccataaaaattgggc

SEQ ID NO: 4901 - DNA, 72 bp, Homo sapiens
cttgagcaagcactgcagatggcccttgttcctgccgggctcctccagctgggagctctcagcccctggtaa

SEQ ID NO: 4902 - DNA, 72 bp, Homo sapiens
cttttttgcacagctgctgttgcctgcccagagatcgggaactctgccccgtaggactggaagaaacctcag

SEQ ID NO: 4903 - DNA, 72 bp, Homo sapiens
gaggaaacccagcttcagagagttctggagcctggcgaaggctctgcagctggtgtactgggagcccaagcc

SEQ ID NO: 4904 - DNA, 72 bp, Homo sapiens
acaaagaaggctcccagaaacaggaactgtaatttcgacacccaactccctacacccatggccctcacccag

SEQ ID NO: 4905 - DNA, 72 bp, Homo sapiens
caattctgtgatgggacgtcagtgctaagacatcacgtctgccttgaccctgacagtgttttttgctgcatg

SEQ ID NO: 4906 - DNA, 72 bp, Homo sapiens
ctgcctcaccttttctgatttcgctttggaagtcacgtaacatgacttccaccacattctattaattacaag

SEQ ID NO: 4907 - DNA, 72 bp, Homo sapiens
tcaagacagaggcaaacaagccttggcgtgcccttcgctccgaaaaacggaggaagccgccgaaagcccagg

SEQ ID NO: 4908 - DNA, 72 bp, Homo sapiens
attttatttccaaatgtgttttttattccgagtcccgttggtgtctatggtttcacttttctccatgagcca

SEQ ID NO: 4909 - DNA, 72 bp, Homo sapiens
gtggcacactttggggacaggaagaaaaggaaatgcgaccccagagtggcagcagaggggcctgtgggttga

SEQ ID NO: 4910 - DNA, 72 bp, Homo sapiens
gcgtggcctcaagttggggatgtggctccttccttcgtcgcgcccttgggcgtggcctcccgagagggcggg

SEQ ID NO: 4911 - DNA, 72 bp, Homo sapiens
gtaaatgagcatgaaatcactgaaaaataaaatcacggcaaattacaatctgggggatatttgaaaatgaaa

SEQ ID NO: 4912 - DNA, 72 bp, Homo sapiens
ctgaatgctgactcatgtcctccccttcagggcaacggaaaggaagggtggagttggaggatctggggctgt

SEQ ID NO: 4913 - DNA, 72 bp, Homo sapiens
aaatccccccgggttggtcggggctgggcggggctcgggggactgggctgaccgcggggtcggggccaggtt

SEQ ID NO: 4914 - DNA, 72 bp, Homo sapiens
cctcaggcagtggggcaggaacacaggcaggcaggcgagtggctcttcaagatggctggtgaggggcaaggt

SEQ ID NO: 4915 - DNA, 72 bp, Homo sapiens
caggcagcgaggtgttgtttcagagcccatccccacgggttctgctgccctggctctgtcccagcctgccat

SEQ ID NO: 4916 - DNA, 72 bp, Homo sapiens
aaaataatcttcaaaattctcagcctaacaagtaacgcttttccagctatttatgcagttttgtaaactaat

SEQ ID NO: 4917 - DNA, 72 bp, Homo sapiens
ggttaaattcctatttatttcatggattagtcatacgtaccaacagtgagggtgcttcttagcacaacggaa

SEQ ID NO: 4918 - DNA, 72 bp, Homo sapiens
gaggttagagtccatttacaaagctgccaggaaaccggccacttctagtaaaccacgtcgtgcctcactggg

SEQ ID NO: 4919 - DNA, 72 bp, Homo sapiens
gctcttgggcaagttgcttaatcattctgggtttacgtgcttgttaaggactctttcagtgcaaatatttta

SEQ ID NO: 4920 - DNA, 72 bp, Homo sapiens
ggaaatactcacgtaagttataggcaagtgaaggccggtttgggtaggacctgccctttcaaagcttcctgt

SEQ ID NO: 4921 - DNA, 72 bp, Homo sapiens
tcgggtacagtgactgaagcactgggctgggagtccgagtgcctgagctgtggtctggttctgctgcctact

SEQ ID NO: 4922 - DNA, 72 bp, Homo sapiens
cccagagaagcgaggaactccgcagctcgtcgacacgtctcgtctcctgtcccaattcagggcttggtgagg

SEQ ID NO: 4923 - DNA, 72 bp, Homo sapiens
tggtctgactgaaagtagctaaaactgcacagtcacgctttctgactcatctcctttgcagttacttctgtt

SEQ ID NO: 4924 - DNA, 72 bp, Homo sapiens
ggaagccctttcccgcctcacaaagaggatcgctgcgtgtctttttcttttaaaatggaataaaaaaaaaaa

SEQ ID NO: 4925 - DNA, 72 bp, Homo sapiens
ggaaaaggaatagtcttgaagaggggaggggcttccgaggctactcaccacagcggctgggtgtgtccatat

SEQ ID NO: 4926 - DNA, 72 bp, Homo sapiens
ttaatacaccctaaaatgtgagtttcccgttccatcgtccatggtcagatttctaagtcaggacacaaagga

SEQ ID NO: 4927 - DNA, 72 bp, Homo sapiens
tcggcaaaccattaaatgaccattttctgacagaacgacttccctgccgctgcgagctgccaggacttgccg

SEQ ID NO: 4928 - DNA, 72 bp, Homo sapiens
tgtctaaaaagccccaatgcacacagacatgcatgcgcgcaaaacagctctagaagggaaaaacttttttta

SEQ ID NO: 4929 - DNA, 72 bp, Homo sapiens
gctgaagctgcatcagcctcatggtgaatccgcctcggggctggaggaagggcccagaggcgatctgagcac

SEQ ID NO: 4930 - DNA, 72 bp, Homo sapiens
tgtgttctcttccctggtgccctgttcatctgtttcggtctctttggctgcttgccctggcccccgtccttc

SEQ ID NO: 4931 - DNA, 72 bp, Homo sapiens
ggggtcttgaggtcaaggagtgtctggtgtttatacggggccttaagatctctgccaacctgtgtctctcac

SEQ ID NO: 4932 - DNA, 72 bp, Homo sapiens
tggtgagccactgggacgagcgccaggcccgggtccgctactaccaccaactgagccaacatgtgaccgtgg

SEQ ID NO: 4933 - DNA, 72 bp, Homo sapiens
caatggcccttttaccgactcgcgcgtctatagtgcggcctcacacaacctctgcggagtccatgagccctg

SEQ ID NO: 4934 - DNA, 72 bp, Homo sapiens
accatcatcatggttggtcactgtgagtaggacttcgccagcccacccaggaaccccagagcccttacaacg

SEQ ID NO: 4935 - DNA, 72 bp, Homo sapiens
tgcttcactgccttgctcgattgtgttcaccaggacggcaggctattaaaatgtcaaggcacattgaattgt

SEQ ID NO: 4936 - DNA, 72 bp, Homo sapiens
tccctgtgtgactctaacccaacctccccacctaccggagaaatgggttttatcctagaaatggggacgagg

SEQ ID NO: 4937 - DNA, 72 bp, Homo sapiens
gaacaaccaggtggtggccaagctgggccacctggcgctgggccgcgccccgggcccaccgccagccgacgc

SEQ ID NO: 4938 - DNA, 72 bp, Homo sapiens
cctctggttaattcagtcgagtgacttgtccaagacggtaaagtcaggactacaacttaagtggtttgacta

SEQ ID NO: 4939 - DNA, 72 bp, Homo sapiens
ttaactaagtgaccaaatccagcgtcatcagcagacggggcaaagtggcatgtgctttctggcatggcacta

SEQ ID NO: 4940 - DNA, 72 bp, Homo sapiens
gtgtgcagcactgcgcttcctgagtgctgggctggcggcagcgtggcacccctgcccacaccaccttccgtc

SEQ ID NO: 4941 - DNA, 72 bp, Homo sapiens
catgtaaaatgatagtcattaatgaggaagtatggcgtggtacttattctgtaagttcagagtatgctgagt

SEQ ID NO: 4942 - DNA, 72 bp, Homo sapiens
gtgcagtctatttttaatgctatttaatgaaggagcgagcgcctcactcagcaataaaagaagcatgaggga

SEQ ID NO: 4943 - DNA, 72 bp, Homo sapiens
agcccagagagggtctggccacagccccaccatgtcgcaatctcccggcccaggacagccatgcggaaggca

SEQ ID NO: 4944 - DNA, 72 bp, Homo sapiens
cctcattgtaccctttcctgctgcctctatacacccgctgccccaactccttacacaaagcgatgctagtcc

SEQ ID NO: 4945 - DNA, 72 bp, Homo sapiens
tgtttctgaccagtcaggacacacaagaggcccggcgcaaacacaacaaagcccgcagacattctgtcccca

SEQ ID NO: 4946 - DNA, 72 bp, Homo sapiens
taggggtgccggcctgttggggagcggcttgctcacgctggggaggcggcagccccgagcgctgggccagga

SEQ ID NO: 4947 - DNA, 72 bp, Homo sapiens
agagactgtcaacaacttttaatgagctcccttggcgtcctagcctagcccccaggcactgggagcattgca

SEQ ID NO: 4948 - DNA, 72 bp, Homo sapiens
aggtacctgtgtgttctgtgtagacctggccctgccgtttgagaaacaatggtgttagaattagaggtatga

SEQ ID NO: 4949 - DNA, 72 bp, Homo sapiens
gcagagatgttatatatgattgctcttcagggaaccgggcctccagctcacaccccagctgctcaaccacct

SEQ ID NO: 4950 - DNA, 72 bp, Homo sapiens
attaactcacagtgtgagcctattatttgaccgagcgagttggcaattggggaacaactgtaccatccccca

SEQ ID NO: 4951 - DNA, 72 bp, Homo sapiens
cgcagccaccctgtgccctgtgctggaatgagtgacggtcttccttatcaggtatagccagggggtgcctgt

SEQ ID NO: 4952 - DNA, 72 bp, Homo sapiens
cagggcccggccgttgtcttggaagcgctggttgacggccagcagccccagctggttggacatgttgcgcag

SEQ ID NO: 4953 - DNA, 72 bp, Homo sapiens
gaattcagtgggctaacaatgcaatttttaaaatacgggttaaggatatcaaaaggcaattcacaaaagagg

SEQ ID NO: 4954 - DNA, 72 bp, Homo sapiens
gcttactgcgcgcccgcagcactgaagtttttttccgcgcgttcgtgatagggaaatggcagggcaggatcg

SEQ ID NO: 4955 - DNA, 72 bp, Homo sapiens
accacgggattttcctcctctgggttctccttttccgagtggggtcagctcccccatgagtcacagcaccaa

SEQ ID NO: 4956 - DNA, 72 bp, Homo sapiens
tgggcagagatatgcctgggtttgggaatgaacaacggtgatctagaagcccgctgtccctgggtagcaggg

SEQ ID NO: 4957 - DNA, 72 bp, Homo sapiens
ctgctctgacacttccagcctcgcctctgtctccccggctctcacgaggaacccctacccccaagcaagcat

SEQ ID NO: 4958 - DNA, 72 bp, Homo sapiens
ctcttattctcactgtagtgttcccagtgaagcggcggaaccggcacagcctagtggggcctcagcagctag

SEQ ID NO: 4959 - DNA, 72 bp, Homo sapiens
tcttccattggtggaactgggaaactgtaaggagacgtgccctgccagatctcagatgactgcagcgctgca

SEQ ID NO: 4960 - DNA, 72 bp, Homo sapiens
agatacaagctcctgccacacggacagcgagaacacgtcctccttctcctccccttcccacgacctgcagga

SEQ ID NO: 4961 - DNA, 72 bp, Homo sapiens
tcccactgtgtgctagacccacataaaggttctcacgctaacactgcaaacctaggagtgtctgcattttgg

SEQ ID NO: 4962 - DNA, 72 bp, Homo sapiens
tggcccaggcctcctgggtgacaggccctgtctggcggggaagagggaccaagagacaacacggaagaggct

SEQ ID NO: 4963 - DNA, 72 bp, Homo sapiens
tgaggtcacaggaaggccccttccagcctgaaacgcgatctcgggatgtggggcctgccaacctgcagcgac

SEQ ID NO: 4964 - DNA, 72 bp, Homo sapiens
aaaaaatctgacactgaaggatgaaatgtagctttcgtagcatgagatttgtggcacaaactgaccagagga

SEQ ID NO: 4965 - DNA, 72 bp, Homo sapiens
ccggccaggaaattgctgcagcctttctggaatcccgttcatttttcttactggtccacaaaaggggccaaa

SEQ ID NO: 4966 - DNA, 72 bp, Homo sapiens
gccagactgccaggtcaccaggccggatccaggagcgctcggacggcccactccccagctccgcagcccccg

SEQ ID NO: 4967 - DNA, 72 bp, Homo sapiens
gtggtggccaagctgggccacctggcgctgggccgcgccccgggcccaccgccagccgacgccgcggccgcc

SEQ ID NO: 4968 - DNA, 72 bp, Homo sapiens
ggcgccgccgccgtgcgagtagctgtgctcctggccggcgacgaagccccgcagcagctcggcctcaccccc

SEQ ID NO: 4969 - DNA, 72 bp, Homo sapiens
gagtggcgttctgagtgccctcactacttgcgtcccgctgtggctgccccaccaaggccgagcccacctgca

SEQ ID NO: 4970 - DNA, 72 bp, Homo sapiens
ccgcccgcgcagagtgagggtaaagcgggagaacgcgtcccgtggtctggggtcagaattccagtcacctga

SEQ ID NO: 4971 - DNA, 72 bp, Homo sapiens
agtcctgtctgacctcaaaatcccctgctcttgatcgtgaggccacactccctcagcctggtgagcctgtgg

SEQ ID NO: 4972 - DNA, 72 bp, Homo sapiens
ccctaattacacttccagcccaatactgaggatatcgttaggcgtccatgggcctgtgacttcctctgactc

SEQ ID NO: 4973 - DNA, 72 bp, Homo sapiens
gatcacaggaaggaggatgaatgagaaccacaaaccgtctgagagattctgtttgaactgtgtaggctaagc

SEQ ID NO: 4974 - DNA, 72 bp, Homo sapiens
tgcaaaattctatagagtgagccaggctccccagtcgatctcctcacccactcctattttccaggaaccttc

SEQ ID NO: 4975 - DNA, 72 bp, Homo sapiens
accggtggaccctggggaccctgcgagctttgtagcgtgaagcctggctcaggctggtgtcctctccgcagg

SEQ ID NO: 4976 - DNA, 72 bp, Homo sapiens
acagcaacttcctgtagtgagcactttgtatgaatcgtggacttcctgttctcaaggcgcaggtatttattc

SEQ ID NO: 4977 - DNA, 72 bp, Homo sapiens
gcgcactgcgtaattaccacgtgtagaaagcaaaacgttgacaagacacggccgttagcaaaaagccgaacg

SEQ ID NO: 4978 - DNA, 72 bp, Homo sapiens
acctgttgttgttctccacatttgctgtgcatcagcgtcacctgggaagttttcaagccctaaccaaattag

SEQ ID NO: 4979 - DNA, 72 bp, Homo sapiens
tcatgccctcagtctctacttcagggaaaagtttacgaagatgtggcttgagtcaatgaaagaatgagtcat

SEQ ID NO: 4980 - DNA, 72 bp, Homo sapiens
ctgtgggtttgggggttctgtgccagctctgctcacgtcttcgtgtgtggaggggttgtgagttaggctgtc

SEQ ID NO: 4981 - DNA, 72 bp, Homo sapiens
acagtggtgactaacttcccctcagaacaaggtggcgtgggctggcagggagcatgcttctcccaaggctgg

SEQ ID NO: 4982 - DNA, 72 bp, Homo sapiens
gccaaggtggaaaatctctggtaaagcactggctccggggtcagccacacaggagctggaattgctcacaat

SEQ ID NO: 4983 - DNA, 72 bp, Homo sapiens
aattaaaccctttctatttaaaaactctggagcagcgagtgaaagcaactcactactctgcaggacaagact

SEQ ID NO: 4984 - DNA, 72 bp, Homo sapiens
ttcctttttctaaacttcatgtacagcagagcttacggtccagagaactcagtcctcaaagaaactgatact

SEQ ID NO: 4985 - DNA, 72 bp, Homo sapiens
aagacagaatccccggaggggtggcaggttcattccgacacttccttcttcccacattgttgtccagacctg

SEQ ID NO: 4986 - DNA, 72 bp, Homo sapiens
ggtaacccggtgcctttctagagcaggcaggctcccggcatgggtggaaacagagcagggggccagcttccc

SEQ ID NO: 4987 - DNA, 72 bp, Homo sapiens
ttttcttctttttctgagacaagatgtcactctgtcgcccaggctggagtgcaatggcgcaatcactgctca

SEQ ID NO: 4988 - DNA, 72 bp, Homo sapiens
cccaggggcacaggaagggggggaaatggggagaccgtaccagcctttttgcccgggatctgaaaggtctca

SEQ ID NO: 4989 - DNA, 72 bp, Homo sapiens
agattggcagcccctgggacctgcttggctccaggcgatctgacagcagggaggattgcgaagtacagatct

SEQ ID NO: 4990 - DNA, 72 bp, Homo sapiens
gggccactgcagggagagggtgcggggctcagggccggggcacactgtccccaccaccggggggacacgcag

SEQ ID NO: 4991 - DNA, 72 bp, Homo sapiens
tcaggcaagagtggtggagctcccgtcaggccctccgccaggcccactgtgggcttctcccctctcctccct

SEQ ID NO: 4992 - DNA, 72 bp, Homo sapiens
agacttggaagggaaattgatcaacatctacaaaacggcttcttaaaggaagcggccctcagacaggacaga

SEQ ID NO: 4993 - DNA, 72 bp, Homo sapiens
ctggctttgtcctgaggcagggttatgtaaccagccgggtctggccaggcagggcacgattctcaacctcct

SEQ ID NO: 4994 - DNA, 72 bp, Homo sapiens
ctgccagggctttgcctaccacacagctcagagcacgggttccctgtcgctaacaaccgttgcgaagggaat

SEQ ID NO: 4995 - DNA, 72 bp, Homo sapiens
cgcgttgatctggttgcggatggtgatgttgctcccggggcaagccgggcaggagcggaagaacgggatgca

SEQ ID NO: 4996 - DNA, 72 bp, Homo sapiens
tggctgtgtagccctatatgacccagcctccctctcggacctgaaagttcaatgggctggtgtctggggaac

SEQ ID NO: 4997 - DNA, 72 bp, Homo sapiens
cccgcccccagcccttgcgacagctcagcccagagcgcctgcgacattggcaggcgagcagcaacgacccca

SEQ ID NO: 4998 - DNA, 72 bp, Homo sapiens
tgcaggtcttagctgcggcacccccacccgggctccgggacctcgcctgttcaaaggcaggggcccagcaga

SEQ ID NO: 4999 - DNA, 72 bp, Homo sapiens
ttccctaaacccaatctctcctcttcctcctctgtcgcctcctccccctccttcctactccctctgcaatgg

SEQ ID NO: 5000 - DNA, 72 bp, Homo sapiens
accaggcagtatgaggctgggagttatgcaacaggcggaacagggcattactgctacatcattcaggagact

SEQ ID NO: 5001 - DNA, 72 bp, Homo sapiens
tagtacccaaagttgatgagtcgacctgctccacgcgtaatttcaaggtggtcacgttggggtcaccccttg

SEQ ID NO: 5002 - DNA, 72 bp, Homo sapiens
cacttgcaggtcatttgcccaggcattggctatttcgagagctgtctgtctggagacatagggaacttagct

SEQ ID NO: 5003 - DNA, 72 bp, Homo sapiens
caaagcacagcgaacacccagaaaggacgaggcggcgggggagagacctggtccaaaacgccgacggtgtcc

SEQ ID NO: 5004 - DNA, 72 bp, Homo sapiens
aggaaaagccagggttctaaagggactatcaggcccggcacagtggctcacgcctgtaatcccaacactttg

SEQ ID NO: 5005 - DNA, 72 bp, Homo sapiens
ccccagtctgttcagcatggctgaaatccacactccgtattcttccttgaagaaactgttatctttactcaa

SEQ ID NO: 5006 - DNA, 72 bp, Homo sapiens
gcctttctttcagtaggccagacgctagctggggtcgtcgggggatccccagcggtgacgccattgaaaagg

SEQ ID NO: 5007 - DNA, 72 bp, Homo sapiens
gaaagagctgaatattcaggaacctgtagggaagtcgtaatagctgaaacttgtagtccaaaaaggggctca

SEQ ID NO: 5008 - DNA, 72 bp, Homo sapiens
tgaatgggagggagaagctggatttgctttcagatcgaggtgccagctggggctgcttcaaggttatctggg

SEQ ID NO: 5009 - DNA, 72 bp, Homo sapiens
ctcagtgcgcctgtttaaggatagcctcagagctccgcccaggctacctgctgttctgacaattagggaggc

SEQ ID NO: 5010 - DNA, 72 bp, Homo sapiens
gagccaccgtgcccggcctaagcctctcataaggccgtgctccctgccagaggccacccttgaagaagattc

SEQ ID NO: 5011 - DNA, 72 bp, Homo sapiens
acgagatgtgtcaaagttttcaaaaacattgccaacgaggcatcagttacaaaacttgctgcagagtgagct

SEQ ID NO: 5012 - DNA, 72 bp, Homo sapiens
acttggcactgaggagtcccaggaggtgactcagtcggatatgtgaggccttagcaccactggccttgctgc

SEQ ID NO: 5013 - DNA, 72 bp, Homo sapiens
tgcgtgttgtaactccaatgacccaagcttcttcccgcctgggaccttcctagtcactacttcccactccac

SEQ ID NO: 5014 - DNA, 72 bp, Homo sapiens
ggactccattgcgcagggtgcattgccctgaagagcgctcctccttccggtgaaagtcgtcgggttcccagc

SEQ ID NO: 5015 - DNA, 72 bp, Homo sapiens
ccctccactgaccctacacccagggctgctactgccgcttgtggcttcaggtaagtaatggcctgtttttct

SEQ ID NO: 5016 - DNA, 72 bp, Homo sapiens
gaacagacagacacccggcccttgtggcttcctctcggcctcaggcacgcaccagccaatctggcccaactg

SEQ ID NO: 5017 - DNA, 72 bp, Homo sapiens
aattatgatgtaaactccgggcacgcggggaccctcgcgcttcgctcactaatttgtccccagaccctacta

SEQ ID NO: 5018 - DNA, 72 bp, Homo sapiens
gcagtcacttggagtaggatgggctgttgagagggcggtaaggtagatctaacatcttagatctctctgctg

SEQ ID NO: 5019 - DNA, 72 bp, Homo sapiens
aatgctcattaagtcacccttcaagtttatcttcccggagccgataatcacaatgccttcagcttcctccgt

SEQ ID NO: 5020 - DNA, 72 bp, Homo sapiens
gcgatccaaagacattaaatattgctttgtgggtacgtctccaccttgcgtcttacttggtgactgttcagt

SEQ ID NO: 5021 - DNA, 72 bp, Homo sapiens
ccgcctccatgagcacactgcttcctccttttctgcgcgtcgtcttctctgtaatgggtctacttgtccctt

SEQ ID NO: 5022 - DNA, 72 bp, Homo sapiens
gccgcggttctcccatcccacagccggcggggggccgccgagacccaggaccctccaggctgacagctctga

SEQ ID NO: 5023 - DNA, 72 bp, Homo sapiens
gtgccaggaggcggtggaggagtggacggactcggcgggcccgcacccccacggccacgaggctgaaggcag

SEQ ID NO: 5024 - DNA, 72 bp, Homo sapiens
tcttggggcctgggccctgtgaaacctctggctctcggacgcagcctggaacccctgagacgaggtcaagct

SEQ ID NO: 5025 - DNA, 72 bp, Homo sapiens
tcctcccccacgcccccctccccagtccctggctgcgtccccagccctgccgcagaaacactccccatgctc

SEQ ID NO: 5026 - DNA, 72 bp, Homo sapiens
caccaactgagccaacatgtgaccgtggacgtgttcggccggggcgggccggggcagccggtgcccgaaatt

SEQ ID NO: 5027 - DNA, 72 bp, Homo sapiens
cctctggatctcaggcactgtggtttcctcaagctcgtgctgataggcccaggcggtatacaggcggaagca

SEQ ID NO: 5028 - DNA, 72 bp, Homo sapiens
tccctgtcccttcagaagtgggaacacagtgccttcgatgcatcccttctagtgttttgacaccctgacgac

SEQ ID NO: 5029 - DNA, 72 bp, Homo sapiens
ccagccacaagctcaagttctatcccctttgcactcgataggcagatcccctgggaggatcaggccacctgt

SEQ ID NO: 5030 - DNA, 72 bp, Homo sapiens
tttctagagagctgggttttttgccccctcaactacgcaccgtggtgaggcgccgaggaggccacatcacaa

SEQ ID NO: 5031 - DNA, 72 bp, Homo sapiens
gtcagagtccagggctctagtgatctggtcattcacgaatgagaaaaccaaggcccacacagggaagtgatt

SEQ ID NO: 5032 - DNA, 72 bp, Homo sapiens
ccagtattcaggtgctaggagtgctccaggctatgcggggctggctgctccaggccccccagtgactgtggg

SEQ ID NO: 5033 - DNA, 72 bp, Homo sapiens
gagctgcactcactactcagcaatcccaatccacacgtgaagggttaagcaggagtacatttgggtgcaggg

SEQ ID NO: 5034 - DNA, 72 bp, Homo sapiens
ttgtgaatctcccgcggtgcattttcagacgagatcgggcgcgttcagagtggtatgaccatagacccgcag

SEQ ID NO: 5035 - DNA, 72 bp, Homo sapiens
tcacctgtgcaagtttccagcatgtgacctgctgacgtgcccgtcccagaggctcagggtccctgagcccag

SEQ ID NO: 5036 - DNA, 72 bp, Homo sapiens
aagccgggtaattttcctctaagctgtcctccctccgctcccctccctgcctgctggtgctggctgtgagca

SEQ ID NO: 5037 - DNA, 72 bp, Homo sapiens
ccttgagtgggactgccttgtgctgctctgggattcgcacccagcttggactacccgctccacgggccccag

SEQ ID NO: 5038 - DNA, 72 bp, Homo sapiens
tgttcaggaaaggaagttgtgtgtttgtgaatgagcgcactttgtggttcatgtgtttgggcaggacaaact

SEQ ID NO: 5039 - DNA, 72 bp, Homo sapiens
ggtcttggaaatggaaaagactcaatacacagcaccgtaggccccagaggatgaacactagttacagaggac

SEQ ID NO: 5040 - DNA, 72 bp, Homo sapiens
cacggcaaaatgcagaggactacctttccctggtccgccccctggccgccccttggggaatgcaaacttcgt

SEQ ID NO: 5041 - DNA, 72 bp, Homo sapiens
cctctctccagaggttgcattttcccaagcttgaacgcttcatgtgcctactctgcaggactgaggagtttg

SEQ ID NO: 5042 - DNA, 72 bp, Homo sapiens
gtccctgccaaaacctaaggaggtctcaatggcctcggattggggcccagggtccttcccacccagagacct

SEQ ID NO: 5043 - DNA, 72 bp, Homo sapiens
caaaacaatctgcaaaactatctggacttcactgccgcctgagatgtggttacttgttcatttaaagaggaa

SEQ ID NO: 5044 - DNA, 72 bp, Homo sapiens
ggaggcattcccagaggtggggaagagagcctgcccggccggagaacatctgccttgctgcacctgaggccc

SEQ ID NO: 5045 - DNA, 72 bp, Homo sapiens
cttccttcctcacaagacagggaggtttgtaaagtcgttcaaaaaccaaagtgttgtacaaagccatatcct

SEQ ID NO: 5046 - DNA, 72 bp, Homo sapiens
agccttgcgctgcctgaccctctcccctgctccaccgcagggaaggcaggttgactcacgggatgtttgact

SEQ ID NO: 5047 - DNA, 72 bp, Homo sapiens
aaagtgttgagattacaggcataagccaccacacccggcctgaacaagcattatagtgttgcttcctggcct

SEQ ID NO: 5048 - DNA, 72 bp, Homo sapiens
catttccaaacctttattgtggtcactttcctcttcgttacactgagaagtgttgctgagggtatagtaagg

SEQ ID NO: 5049 - DNA, 72 bp, Homo sapiens
cctcttcaaagaattatgaatattacgtaagataacgtgtgtgaagtgcctaagcccattcctggcacatac

SEQ ID NO: 5050 - DNA, 72 bp, Homo sapiens
agccccacacccctgcccatgaggtcacaggcagacgctgccaggaagcagggtggccactgctgggccttg

SEQ ID NO: 5051 - DNA, 72 bp, Homo sapiens
agaagcaaaatgtaaaagtttcatttcaaggagaacggagtaaacagatgtgtcaaattgctgctgatgtca

SEQ ID NO: 5052 - DNA, 72 bp, Homo sapiens
gcgaatgaagaaggcctcgtgcttcgccagcgcctcgtgcagcagcagcaggttgccctcgctggtgagggg

SEQ ID NO: 5053 - DNA, 72 bp, Homo sapiens
agtttgcatcagactgggaagcgaacttaagccagcggtgcgtggcccaggagtgggaaaggaaatggatgc

SEQ ID NO: 5054 - DNA, 72 bp, Homo sapiens
ggccattgccatggcaactagggtgtactgggctccggagggaagccaagggtgggggtggaccaggacctc

SEQ ID NO: 5055 - DNA, 72 bp, Homo sapiens
gacatccctggtcattgtcttctgctgtctaaccacgtcgtctttcccataggctttccatctactgagaaa

SEQ ID NO: 5056 - DNA, 72 bp, Homo sapiens
tactcagaatgctacatcagagacatcctccttgacgtccccctaccccaggtaaaaggaagagaccattga

SEQ ID NO: 5057 - DNA, 72 bp, Homo sapiens
ggcctcaatccagaggctagtatttcttctcacatcggaaatgataaagatgctgtgaccacaactttcaca

SEQ ID NO: 5058 - DNA, 72 bp, Homo sapiens
aaagataacgttaagtctgtggaggcttccgttatcgggaaaagatgctgtagtgatcttttctgagtgtct

SEQ ID NO: 5059 - DNA, 72 bp, Homo sapiens
gtcaccctgagccagcgccagagttcctgcccactcgtgagtaggacaacatacccaggagatactgctgca

SEQ ID NO: 5060 - DNA, 72 bp, Homo sapiens
tttctgctgggatccttccaaacccttttgggaaccggcaatagcacttgtcaggggaaattagttctgcac

SEQ ID NO: 5061 - DNA, 72 bp, Homo sapiens
tgatctgttcaggtcccctggttgtgcaggagaaacgtgctgtgttcggtcggctgtgtcctgacgggcgtg

SEQ ID NO: 5062 - DNA, 72 bp, Homo sapiens
aacacccagcatgtgctaggcagaaactaagtgtgcgaagcggatcccgatgtacaaaggggaaaacagcgg

SEQ ID NO: 5063 - DNA, 72 bp, Homo sapiens
aggctgctgttgttgctttagttgtgccacaaccacgtggtcctggaaactgcctcgctcactttgtctgcc

SEQ ID NO: 5064 - DNA, 72 bp, Homo sapiens
tcggccatgtggtcccctccctatcctgaggataacgacatttgagagaagccaatggtattggaaggccag

SEQ ID NO: 5065 - DNA, 72 bp, Homo sapiens
tcctggcccattgggaaatcgcagtgtcctctggccggtcccagcacccccgggtgggaccccagcgaccct

SEQ ID NO: 5066 - DNA, 72 bp, Homo sapiens
gcatgcttcagacaacacaaaattcatttttaacccggctttcttttggcagtaaatttctcttcctaatca

SEQ ID NO: 5067 - DNA, 72 bp, Homo sapiens
catgcccttcctacaggtgctgccaaggtggcctccggtgagctgtggacaagtcaggcctgcctgcctatc

SEQ ID NO: 5068 - DNA, 72 bp, Homo sapiens
ttgcaccacaggggttttaacagctctcttgccctcgcttctgggagcctcaagcatgcgtgtcacagactg

SEQ ID NO: 5069 - DNA, 72 bp, Homo sapiens
attccgtttctattcttcaagttccttaaaagctgcgccattttttgagtgaaaaatgtgcgtaacttctga

SEQ ID NO: 5070 - DNA, 72 bp, Homo sapiens
gtggccggtgacgctcagccagcgccgggaatcgccgcccaggccccaaggaccagaatcaggagcaggatc

SEQ ID NO: 5071 - DNA, 72 bp, Homo sapiens
ctccaccctcaggtatccatcacccagctccagcgcgcctgggaaaaccgccccgaaagtccaagaggaagc

SEQ ID NO: 5072 - DNA, 72 bp, Homo sapiens
cacatccaatctgtcagcaagtcctgttgactacacgttcagtatgcatgtgaaacctgatcgcttctcttc

SEQ ID NO: 5073 - DNA, 72 bp, Homo sapiens
agcatctccttacaggtgcctccatcctgtccttgcggaaggggcttaggacaccccgcagtccgcgccccg

SEQ ID NO: 5074 - DNA, 72 bp, Homo sapiens
tgaagggttttgctatttccaaagcttccccttatcgtcccctgtgattatctcccaaccccgtgacaaagg

SEQ ID NO: 5075 - DNA, 72 bp, Homo sapiens
ttgtctatcctcctcactccttgctcagccccgcccgcttttctaggcccgcccctccagggccccaccctc

SEQ ID NO: 5076 - DNA, 72 bp, Homo sapiens
ttataattcctatgtagacttctaaattattccctcggccctcatcctctgccaccagattcccctccacca

SEQ ID NO: 5077 - DNA, 72 bp, Homo sapiens
tgactcaaaggcacagccttcacattgcatgccaacgtgggttatttttcagaggccagggaaaaggagaga

SEQ ID NO: 5078 - DNA, 72 bp, Homo sapiens
gcctagaagagcaggactccggaggagcttgggagcgaggctcggggcttggctgtctctgggcgatctctc

SEQ ID NO: 5079 - DNA, 72 bp, Homo sapiens
tcacttatctttgttgtatgctgagctaattagctcgaaaggctggctgacaggcgggttcccattgctttc

SEQ ID NO: 5080 - DNA, 72 bp, Homo sapiens
tggggccacaggggctcagggttaggctgcggggacggacaggaggatgagctggaaaggggtgagtcacgc

SEQ ID NO: 5081 - DNA, 72 bp, Homo sapiens
actctgcccgctgcagggtctgctccagcagggcccgcctgagggacaataggggccaccgaaggacatggg

SEQ ID NO: 5082 - DNA, 72 bp, Homo sapiens
agagggggtgcaggctgaggagctgcccagagcaccgctcacactcccagagtacctgaagtcggcatttca

SEQ ID NO: 5083 - DNA, 72 bp, Homo sapiens
tccccacgtttatttcttttcaagagaaagttgttcgaaatgtgaacgttttccatctttacctgactggcc

SEQ ID NO: 5084 - DNA, 72 bp, Homo sapiens
gggagctgccccagaggtccctttggagaacctcccgggaacgccacgcctctcagcgttctgcaagtgttg

SEQ ID NO: 5085 - DNA, 72 bp, Homo sapiens
cattgtttggtatatttacatattttgataattatcgggtatgttgcaagctatgatgaaagcaaaacatac

SEQ ID NO: 5086 - DNA, 72 bp, Homo sapiens
aagccaccacaagtcacagcagtgatttgcacccccggggtgggactggagcagacactcccagggagcaga

SEQ ID NO: 5087 - DNA, 72 bp, Homo sapiens
gcacttgttattttctgggctgtggttgctgttatcgttgtttttggtagtagccatcctaacaggtgtgag

SEQ ID NO: 5088 - DNA, 72 bp, Homo sapiens
agggaaagaaaggtatttttgtgatcgctcttcagcgttccctatgcggcctggttcatacagtcacaacaa

SEQ ID NO: 5089 - DNA, 72 bp, Homo sapiens
tggggtggggacagggggaggggaggggctactctcgggccacacgcaatcccacccttgctcacactctcg

SEQ ID NO: 5090 - DNA, 72 bp, Homo sapiens
ctcaaaacattaaacagacaattaccaaacaatctcgcaatcccgcttccgggtatatgccccaaacaactg

SEQ ID NO: 5091 - DNA, 72 bp, Homo sapiens
gtctgggtagttaacatgatctaaacatccctcttcgttccgctaactccggctcttcttcgggctcctcgg

SEQ ID NO: 5092 - DNA, 72 bp, Homo sapiens
gttaataggcggggttatgtgatgtgacacagaggcgtttagccagaatggtcaaagaggacctcctgagga

SEQ ID NO: 5093 - DNA, 72 bp, Homo sapiens
aaagccctttctgatcccaggtcttagtgagccaccggcggggctgggattcgaacccagtggaatcagaac

SEQ ID NO: 5094 - DNA, 72 bp, Homo sapiens
gaggcgatcaatcttagccccctgacagctccctccgattgcatcaaagaatttggctctttgggaaagcag

SEQ ID NO: 5095 - DNA, 72 bp, Homo sapiens
ggccagcccaggcctctgctctggcagaacaagtgcggcaggcgggcgtgctggcagagctcggcgtgggta

SEQ ID NO: 5096 - DNA, 72 bp, Homo sapiens
accctatccttccccagactccagtgacagtttaacggtcagctgcatcaaggcttgtgtactgtgcagtct

SEQ ID NO: 5097 - DNA, 72 bp, Homo sapiens
ccccggctggccactgggtcgggcatggggccttacggggccctcacgggtcccgccgccgccctcctgagg

SEQ ID NO: 5098 - DNA, 72 bp, Homo sapiens
gcttagactcactacttgctaaataacgttggcttcgttacataaacccactggcctgtttttcaacggtca

SEQ ID NO: 5099 - DNA, 72 bp, Homo sapiens
gctgcccatcgtcctgcaggtgagtttcttcagaccgggccagacagccgaggttcctcaggaaggaagcca

SEQ ID NO: 5100 - DNA, 72 bp, Homo sapiens
tcagaaatctgctactaaaatccccaccctacacccgtactggccacatggcgtggttggtaagtgtgtgtg

SEQ ID NO: 5101 - DNA, 72 bp, Homo sapiens
tgccagccggctcttgctcacagcgacagcaccagcggtttgctgccctcaggtcttggttaccatgtgtca

SEQ ID NO: 5102 - DNA, 72 bp, Homo sapiens
cactgccaaaggaagtcagtcagtaatttcacaaccgttatcagagtttggaagcagaaatagctgttaact

SEQ ID NO: 5103 - DNA, 72 bp, Homo sapiens
tactccattgagagtcttagtcatggagggaaacccgaaaaccaccggtgtccgggacagatactctgacgc

SEQ ID NO: 5104 - DNA, 72 bp, Homo sapiens
cctcactgcctaggacctgccagccgctctgagtgcggggcccgccaagcccgtgcccacccagaacaagca

SEQ ID NO: 5105 - DNA, 72 bp, Homo sapiens
caccgaaggctctgcggactgctctaggactcgtccgccctggagaagacaaagccacgctttctggagacc

SEQ ID NO: 5106 - DNA, 72 bp, Homo sapiens
ctcttcctttctctgtgccaccaggaagctgattacgacagaatatactgccacatcacccacgctcccgtg

SEQ ID NO: 5107 - DNA, 72 bp, Homo sapiens
cactagcaaaatggagatcaggaggttgcccaccacgctgactcctattatgaaacccaaggaagtcagttt

SEQ ID NO: 5108 - DNA, 72 bp, Homo sapiens
gtttgcctctgcaggagagaaatatgaacttcacgcgggaacagagtcgacacccagcgtggtggttcatgt

SEQ ID NO: 5109 - DNA, 72 bp, Homo sapiens
cggtgctgaggcgctgcaggcccggcttctggctgcgggggagctgtaccctgaagcctcgccggaactcgc

SEQ ID NO: 5110 - DNA, 72 bp, Homo sapiens
aataaacacacaaataagtggaagtgttggctggccgatgcaggaaatcaataaggtggtctggtggtgact

SEQ ID NO: 5111 - DNA, 72 bp, Homo sapiens
tcctttttggttaaactcatttgagttggcttttccgttagttgccgctgaaagcacgctaccagatacagt

SEQ ID NO: 5112 - DNA, 72 bp, Homo sapiens
atatttggctttgagccacattattctgcagcccccgtattttcttccaggcaggcccttcctggtgtagac

SEQ ID NO: 5113 - DNA, 72 bp, Homo sapiens
ccaggaaaacacctgggcagttgtctataagtggacgtggagagatgtccaggacatctaggtaagtgcaaa

SEQ ID NO: 5114 - DNA, 72 bp, Homo sapiens
ctcggttccagggttgaggacttgccaggcctctgcgagcattctgctttaatcctcacaacaactctgcct

SEQ ID NO: 5115 - DNA, 72 bp, Homo sapiens
tggtacaggctgagttctcacaagagacacacacccgtgtcactgtctcctgagctgtgccggacccgtcct

SEQ ID NO: 5116 - DNA, 72 bp, Homo sapiens
ctgcagtcgccgccctccaggcccctcccctggagcgctggagggccccttagccccatggatgggtatgaa

SEQ ID NO: 5117 - DNA, 72 bp, Homo sapiens
ctgtggggcattggtgctggctacacatcaagctgcgaaatagccaagtttggtctggtgccttttcttctc

SEQ ID NO: 5118 - DNA, 72 bp, Homo sapiens
aacaacagaaataacagaacacaacacaagaaccacgtgctaaaaggagaagggggaagctgtggcggagga

SEQ ID NO: 5119 - DNA, 72 bp, Homo sapiens
gcaatccaggaagcccgcgtcaggcccaggaggtgcgccagctctctaggatgctggccaaggtcccccgca

SEQ ID NO: 5120 - DNA, 72 bp, Homo sapiens
ggaaattcatctcttctgggtcccaaccttggcctcgggagagccccagatgcccccctctgtgtctacccc

SEQ ID NO: 5121 - DNA, 72 bp, Homo sapiens
acaggggcttttctggttgccaaacgtgcagacgacgggcctgacatccccatttcccaggaactctgtgga

SEQ ID NO: 5122 - DNA, 72 bp, Homo sapiens
gggagtttctctggcaacgaggcatttccaacaaacgggtcattctgtcaccaggggatggtctcagtccac

SEQ ID NO: 5123 - DNA, 72 bp, Homo sapiens
cggccggacagtgcgcgtgcacacactatctgcggcggtgtgctgacaagccaattgaggggactccatctt

SEQ ID NO: 5124 - DNA, 72 bp, Homo sapiens
gttccctttgtcccaaatttctcaatctcctggggcgttgggagttctggccgttttgccttccccaaagcc

SEQ ID NO: 5125 - DNA, 72 bp, Homo sapiens
tgccgggcagggttgcacccacatgtgcaagccagcgacggaccccaggttcacccgttcaccggtcagtgg

SEQ ID NO: 5126 - DNA, 72 bp, Homo sapiens
tcttgttctcctagggtgggagtacagcagccaaacgctgaacttagtcccatccacttccatcttatcctt

SEQ ID NO: 5127 - DNA, 72 bp, Homo sapiens
tctgcctcggcctcccaaagtgctgggattactggcgtgagccacccaacccagcctgcattgtatgttaaa

SEQ ID NO: 5128 - DNA, 72 bp, Homo sapiens
ctgtctcctattacactcagagcaggagtggcacacgacatcccatgactaagcatgagcaggcaccttccc

SEQ ID NO: 5129 - DNA, 72 bp, Homo sapiens
acctgtgagagcggggtggcgagggccggcctgggcggagaagggcccgcgcatcggggcttaagcctggac

SEQ ID NO: 5130 - DNA, 72 bp, Homo sapiens
gtggtttccaacgacacataccgtgacctccaaggcgagcggcaggagtggaagcgcttcatcgaggagcgg

SEQ ID NO: 5131 - DNA, 72 bp, Homo sapiens
cccggctcggactcccaaagagctgggatcacagacgtgaaccacgcgcccggccacattccccaattaatg

SEQ ID NO: 5132 - DNA, 72 bp, Homo sapiens
gccaaggcagcactggggtgacccacaccgagggccgcaccagtgggcaaagggccaggcccaagtttgagg

SEQ ID NO: 5133 - DNA, 72 bp, Homo sapiens
cttttacacttgatcttagatgaagggccaagaagcgatatctgtggctctttttattttatctttttattt

SEQ ID NO: 5134 - DNA, 72 bp, Homo sapiens
gcagagatgccagaccctgaccttccagccctccccggccccccacccccacccccccactcccccgctctc

SEQ ID NO: 5135 - DNA, 72 bp, Homo sapiens
gtcctgatgggatttggagttacactgcctgggttcgaatctcaattccgccactgccattcgcgcgttttc

SEQ ID NO: 5136 - DNA, 72 bp, Homo sapiens
gcaaccgtcccagcttcgtggactgtcagggtcaccgagagtccagggtggtgggagtcccccacacgagcc

SEQ ID NO: 5137 - DNA, 72 bp, Homo sapiens
agcaagaccctcgggggaacccttagggaagtcaccgggttgtccttttaaacgatgtgtgccaccgcacag

SEQ ID NO: 5138 - DNA, 72 bp, Homo sapiens
gctcctctgtcctcatccgctgtgggaggggtaggcgggcatagtgcccggtgagcctcctctcctgccgtc

SEQ ID NO: 5139 - DNA, 72 bp, Homo sapiens
cggtgctcactagacacccgctgtcacgtgcagtgcgtctaaggcttggggttttcccgggctcaccccagg

SEQ ID NO: 5140 - DNA, 72 bp, Homo sapiens
aggggtgggtatgaagatgcttcagagctcatgcgcgttacccacgatggcatgactagcacagagctgatc

SEQ ID NO: 5141 - DNA, 72 bp, Homo sapiens
tgataatagttcacatttcctgagaacttcctaggcgtaaacacccagctaggtattttacatacattattt

SEQ ID NO: 5142 - DNA, 72 bp, Homo sapiens
catgggaagtgcctggggcagaagtgaaagagacacggccccaggtcgtgagagaagacattgaggtgcact

SEQ ID NO: 5143 - DNA, 72 bp, Homo sapiens
ctggaattcactgtctccttgcccattgcagtccacggccttcaggcaccgttggactggtattcagcaccc

SEQ ID NO: 5144 - DNA, 72 bp, Homo sapiens
ctaattcaggaaggtgtggtggcctccaagggagacgctgagggcctgcttggggtgggcttgataataatg

SEQ ID NO: 5145 - DNA, 72 bp, Homo sapiens
ttgactgtggcttttagaagatcagaagcccataacgtgtttctgtttttgtttgtttcctggcaggttggc

SEQ ID NO: 5146 - DNA, 72 bp, Homo sapiens
cgcgagtcccaccgggtgacccgctccctggggggcgtgaagcccccagacctgccctgcccctgcctggag

SEQ ID NO: 5147 - DNA, 72 bp, Homo sapiens
cgatttctcgcaccaggcgctgaaatggcagtttgcggatgagcagctcagtcgacttctgataacggcgga

SEQ ID NO: 5148 - DNA, 72 bp, Homo sapiens
cattgagccactgatccaataccaagagtttctatcgtcagacctcgttatgcaatttaaaaaacaaaccaa

SEQ ID NO: 5149 - DNA, 72 bp, Homo sapiens
tcctgcagtctgggtttctgggcacgtggcctgcgcgtggcgccattgtggagtgtcccgcgcccatgtcct

SEQ ID NO: 5150 - DNA, 72 bp, Homo sapiens
gcagcactgtgtgggagatccacatgtgaatagcccgtgtttgagaaatgtccaatcctgatcatgtcagga

SEQ ID NO: 5151 - DNA, 72 bp, Homo sapiens
gtcagctgcaatgagagactggtgattaagggcaccgtgggcaggacacagtcctcgccttacccaccccat

SEQ ID NO: 5152 - DNA, 72 bp, Homo sapiens
ctgtaaaaggggcactgtccaccctccaaggttctcggatgattgattccccagctcctctgaatgccccac

SEQ ID NO: 5153 - DNA, 72 bp, Homo sapiens
aaacacaaaaccctagggaaccatgctaactgtcccgggtgatgatggtgagacattcatggtgagcatact

SEQ ID NO: 5154 - DNA, 72 bp, Homo sapiens
ctccaggccgggccgactcaggctgcgccagggtccgctagcctctgggatgcatggggacccctgggacga

SEQ ID NO: 5155 - DNA, 72 bp, Homo sapiens
tagggctcaggtgggctcctggaacatgctggagtcggcggctcaccccggatggttcatctgcacctcctg

SEQ ID NO: 5156 - DNA, 72 bp, Homo sapiens
aaccccaggaaaaggaagaggtcgaaccaaccctgcggaaggagcatggtttcaggagtttattttaagact

SEQ ID NO: 5157 - DNA, 72 bp, Homo sapiens
cagtggctggcagctggtggcgctgtggttccagacgaggcttggaaggaggctgtggggtgggcggggagg

SEQ ID NO: 5158 - DNA, 72 bp, Homo sapiens
taagggctgttcactttctctgaccacatggtttccgcttctgtgtctcttgtttcctaggctgataaaaat

SEQ ID NO: 5159 - DNA, 72 bp, Homo sapiens
ggttggtttaattatgttaaaagcaaccctaagaccggaaaaagcttttaacattcctagcacataaaaata

SEQ ID NO: 5160 - DNA, 72 bp, Homo sapiens
ggccggcttccagtcgcccccggggtagcggctctcgttctgatagacttcatcagtgaactccgtgtgacc

SEQ ID NO: 5161 - DNA, 72 bp, Homo sapiens
caccctaattcttctccagccctcagcttcctctccggcagcctggggtgaaggcctctgtaggaccaagtg

SEQ ID NO: 5162 - DNA, 72 bp, Homo sapiens
ccacggctggtccaagctgctcttatcagacaatgcgaggcacttccacaggaggggacaaccccgtcctta

SEQ ID NO: 5163 - DNA, 72 bp, Homo sapiens
ctggcaaaagagaatctgagctcccagccccgccccgggagctctagaaggaagccaggaggaacctccagg

SEQ ID NO: 5164 - DNA, 72 bp, Homo sapiens
tttttctgagctgcagaagagctgggatgattcagcgtcttggggtggggtggagaggagacccaggacagg

SEQ ID NO: 5165 - DNA, 72 bp, Homo sapiens
cggggatgccccagcaggccctgcctttctctggccgtcagtcccttcatgtttaaagtagagaacgggcta

SEQ ID NO: 5166 - DNA, 72 bp, Homo sapiens
caggtggcagatacgggcccaagcaggccctgccacgatgatgaagatgacaatgaagccacagaaccctcc

SEQ ID NO: 5167 - DNA, 72 bp, Homo sapiens
ggcggaagcaggaagccctgggacagggggtagcccgcctggtacttcccaagcttgaaggacacacctgtg

SEQ ID NO: 5168 - DNA, 72 bp, Homo sapiens
aagtggggacccagcctgggcattgggcaactcaacggcctctggcattgggctataagaggagcttgaccg

SEQ ID NO: 5169 - DNA, 72 bp, Homo sapiens
gggctgtgcatcatcttgcccctgtgcttactgggcggatattccacatgtcatcataattcaaaggaaatt

SEQ ID NO: 5170 - DNA, 72 bp, Homo sapiens
accagctgtccatgagcaatgacaaagaactaaagcggggatgggggagagggggtgtagggcccaagagct

SEQ ID NO: 5171 - DNA, 72 bp, Homo sapiens
gccggccagaagacacctaccctggccggaagacacgtacccctgaagatcgagaaacaggccatctgggta

SEQ ID NO: 5172 - DNA, 72 bp, Homo sapiens
tgttactacagtggtgactttccttgacccatctacgccgattccctctccgggactgcgcccaaagcttcc

SEQ ID NO: 5173 - DNA, 72 bp, Homo sapiens
ctccacacctcctcaacagatctttatcctggacacggcagggggtccccgtgccctccgagaatccaagaa

SEQ ID NO: 5174 - DNA, 72 bp, Homo sapiens
gagagaatccccttcctctttcctccctcctcttccggctagttcaggactcccctgtgatggggtaattca

SEQ ID NO: 5175 - DNA, 72 bp, Homo sapiens
tcacattaaccataaagacagaccccaacctctttcgtaagtgttctcagtcaaaaggcagaacttcggata

SEQ ID NO: 5176 - DNA, 72 bp, Homo sapiens
acgtgcatttcgacttagggtattttcagctcatgcgggtttatcgggatgttccttgtaagttcctcgttg

SEQ ID NO: 5177 - DNA, 72 bp, Homo sapiens
aagtgcagaaccaggacagcaagcctctgtcctggcggttctcacccagtctggacccaaaggcaggaaagt

SEQ ID NO: 5178 - DNA, 72 bp, Homo sapiens
aaacgccaacccaatgattccctaaatggggtcttcgcatcagctgcgttaaaatcaccccagcaggcaggt

SEQ ID NO: 5179 - DNA, 72 bp, Homo sapiens
gacagcattttggccacatcccctctgggcacagtcgactgctcagttggttctgggagctacttgttagct

SEQ ID NO: 5180 - DNA, 72 bp, Homo sapiens
cccatggggtacacacagagcagtggaaggcctgccgggccttgcgatgaggtattgactatgggatggccc

SEQ ID NO: 5181 - DNA, 72 bp, Homo sapiens
tgccattataaccgaggttcctggactgcaccaatcgctctgcaaccccagcacctctcggaggagaccccg

SEQ ID NO: 5182 - DNA, 72 bp, Homo sapiens
gcaagaccaggctccgtagccctcagggaaacattcgaccacaactgtggtgtgtgggccccgctgtttgct

SEQ ID NO: 5183 - DNA, 72 bp, Homo sapiens
cagtcatgtcatccaagaagttgttggcataatctcggagtgcaacagcaaggacctaaacgggcagatcct

SEQ ID NO: 5184 - DNA, 72 bp, Homo sapiens
cagaacgtttcaggcagaggaaatatgccaagacccggtgctcagaaggtgggggagcgtggccaaagctaa

SEQ ID NO: 5185 - DNA, 72 bp, Homo sapiens
gccaaatcccctccctgggccaagacccaggcatccggctgcccagccacccagccttggggcgtgtaggag

SEQ ID NO: 5186 - DNA, 72 bp, Homo sapiens
ggaaactcagtcaccaatactgtcttttttgttgtcgttgttcccaaactgatagctgtaatttcataatcc

SEQ ID NO: 5187 - DNA, 72 bp, Homo sapiens
atgccctgggttctgcccgcacggacccccatgtacgtacccgctgcatccatggctacccaaccatacccc

SEQ ID NO: 5188 - DNA, 72 bp, Homo sapiens
ttagcatggcatgttaggcaccagcatgaccctcccggtgctgggtgctaaaacctccaccttgaaggaagt

SEQ ID NO: 5189 - DNA, 72 bp, Homo sapiens
acactccatcggaaaaaagggaaggaaggatcagacgcggctgtatacaacttcttaaactcactgtgtgct

SEQ ID NO: 5190 - DNA, 72 bp, Homo sapiens
ccatttcagctttcacagctcctaggacataatgacgtaactgtgcactacacaaattactaacatcaacat

SEQ ID NO: 5191 - DNA, 72 bp, Homo sapiens
tttggggaacgcaaggcagagttctttctgccttgcgggcttagcgaatgggtgtcctggaggaggggaccc

SEQ ID NO: 5192 - DNA, 72 bp, Homo sapiens
tagggcttgctgatgaaagggtgcaggttgccagccgggaaaactggggctggagctatgctttggctcttc

SEQ ID NO: 5193 - DNA, 72 bp, Homo sapiens
agtttcggggatggcggccggcgagggccatactgcgtctttccggagacacggaatacggcaccagccgtc

SEQ ID NO: 5194 - DNA, 72 bp, Homo sapiens
gagagaattcagttttgctcttattaccagccacccggcatgcggatcttgctagtcaccactgtcctcaga

SEQ ID NO: 5195 - DNA, 72 bp, Homo sapiens
agtgcttgggttgtcctcgcccagctctccatccccggagggagaatggctggaggggggctggtggttgcc

SEQ ID NO: 5196 - DNA, 72 bp, Homo sapiens
gggaaaactgagtctcagaaggggccataagtggacgtggctgttgcagaaagtgagaggagattctgtgag

SEQ ID NO: 5197 - DNA, 72 bp, Homo sapiens
ggccaactgacccatgccctagcctgcagacactgcggcagcagctgcttccagagtccaggaaatctggtg

SEQ ID NO: 5198 - DNA, 72 bp, Homo sapiens
ctccagcatgcttttctgtcatctgactcactcagcgctagactaacagtgggattaacatgcagtgggtac

SEQ ID NO: 5199 - DNA, 72 bp, Homo sapiens
aatttccacattgttttctacttccttttatttttcgaataaaatgtatacctttctgcctccagttccata

SEQ ID NO: 5200 - DNA, 72 bp, Homo sapiens
gatcaaaatattcagtgcggccagaacatgcagctcggcaaactctaaggagtcccaaatataacaacctac

SEQ ID NO: 5201 - DNA, 72 bp, Homo sapiens
gcctactcccaccctgcaaaccagtggttttcaaccgggggcaagtttgccccacagaggatatttggcaat

SEQ ID NO: 5202 - DNA, 72 bp, Homo sapiens
gaggtcacggaggcctaggaggagcctcttggtgacggtcctaacccacaagcccagccctgcaggaaaggg

SEQ ID NO: 5203 - DNA, 72 bp, Homo sapiens
gtgcagcctcccgagtgcagagtgcagcccctgcccgccctggcccagctgcccatgtctaccctgctggat

SEQ ID NO: 5204 - DNA, 72 bp, Homo sapiens
gaagttcaatacatatttgtggaatagccttattacgcctttagggaatggagcaatgccttgcctattaat

SEQ ID NO: 5205 - DNA, 72 bp, Homo sapiens
ccaggaggaccatgtgaatggggccagagggctcccgggctgggcaggtaaggagcgctggtattgggggcg

SEQ ID NO: 5206 - DNA, 72 bp, Homo sapiens
ttgacctttggctccctggcctccagcagtctctgcgtgttcccagctctgctctgctcaccacatgtgtta

SEQ ID NO: 5207 - DNA, 72 bp, Homo sapiens
gtgcagcctgggaggaagagagggactgcctcttccgtgggtgtctttgtgccctgactggcgccaggctgt

SEQ ID NO: 5208 - DNA, 72 bp, Homo sapiens
ccctaaagtctcccaaaagaaatgggtgggccgggcgtggtggcggacgcctgtaatcccagctacttggag

SEQ ID NO: 5209 - DNA, 72 bp, Homo sapiens
catcgcttacctcaccaccttctggcacttgtttccgtaccctaaaggaaacagtcactgaacacctccccc

SEQ ID NO: 5210 - DNA, 72 bp, Homo sapiens
aaggccatttcataacacaagcggtctctgtcctccgtgacagaggaaggcggatttccccgaggcatcctg

SEQ ID NO: 5211 - DNA, 72 bp, Homo sapiens
gaaggctgaagtgtggcaattcacgttgtgggtggcgaggaaagggggaggggtgcctatgggcttcccact

SEQ ID NO: 5212 - DNA, 72 bp, Homo sapiens
gaagggatccaaggggaaggaaaggagaggagacccgtgggtcagggccagactttaacctggctccagggc

SEQ ID NO: 5213 - DNA, 72 bp, Homo sapiens
aagccagctctgcagtggaatctggggattatagccgggtgtggcactccgccctgtgtgactgtcctgtcg

SEQ ID NO: 5214 - DNA, 72 bp, Homo sapiens
cactggctgggctggacccatgagtcagggctctgcggcagactgaatcaacagagaagacaggcctggccc

SEQ ID NO: 5215 - DNA, 72 bp, Homo sapiens
ttggtgtgtgtgtcttctgtcctggtcctctgtagcgtccctccatgtgaggtcctcccattctatctcatt

SEQ ID NO: 5216 - DNA, 72 bp, Homo sapiens
agtttgtaagcactgataaggatatgtaacattctcgtgtaatttctaaataagtttcattacttctaacct

SEQ ID NO: 5217 - DNA, 72 bp, Homo sapiens
ggagccaagaaatgaaagggcccggtgggtgtgggcgggccctgctccgatctggatctggccagtgcctgt

SEQ ID NO: 5218 - DNA, 72 bp, Homo sapiens
ttttgtacacaaattgtgattaagtaattttccaccggtaggttatcatagtaggcacttggctgtggcaga

SEQ ID NO: 5219 - DNA, 72 bp, Homo sapiens
atggagataatgcctccgcgcgctgagcccgagcgcggtcgtgctgttacactattgctgctgctatgtcgt

SEQ ID NO: 5220 - DNA, 72 bp, Homo sapiens
acttccccctctccatgagcgtgaccagtgggtctcggtcttgcctccgcgtgggccgtacaggacaagggc

SEQ ID NO: 5221 - DNA, 72 bp, Homo sapiens
cagaggaggtggcagggccaggcgtgccagctcctcgatcccctcccccagccctggagccttgtgacaagc

SEQ ID NO: 5222 - DNA, 72 bp, Homo sapiens
tttttccctctgaatctggaaactggagccaggctcgctcttgaactacatgctaccccgaggaccttagat

SEQ ID NO: 5223 - DNA, 72 bp, Homo sapiens
tggataattttcctaagccctcactgactcctactcgcatgtattgctaggagccagctttcactcctggga

SEQ ID NO: 5224 - DNA, 72 bp, Homo sapiens
gacaccagaaaccagcagatgggaacgaaagcaaccgctagttgccctcactgctcactaacatagacactc

SEQ ID NO: 5225 - DNA, 72 bp, Homo sapiens
ttgcttctgctcgcagtccccatttctgtgtatgccggggcgggttggggtgtgtatttgaaaggaaagttg

SEQ ID NO: 5226 - DNA, 72 bp, Homo sapiens
aataatttcctcaagtatcactgaatttcatggctcgtgactgagagtcttttctgacatcttacaggctaa

SEQ ID NO: 5227 - DNA, 72 bp, Homo sapiens
accacatcctggtggctgcctctgtgccagggcctcgtggactctgggcatggtgctctgaatgaagacaaa

SEQ ID NO: 5228 - DNA, 72 bp, Homo sapiens
aatgcttatagtggttcattcttcccatgaatacacgcaatcctctgaaatcctgatgtgaccttggcatga

SEQ ID NO: 5229 - DNA, 72 bp, Homo sapiens
gtttgggctccctcctgccatcgggtggggggtgtcggcggaagggggtacgtgtcctgtcctctcccagtg

SEQ ID NO: 5230 - DNA, 72 bp, Homo sapiens
cccggttttgacattttaaaactcctcttggttgacgaatactctctacatgtaatacaggcacattactaa

SEQ ID NO: 5231 - DNA, 72 bp, Homo sapiens
ctgttcggtggtggcgttgccttctgcgctggccccgtggatggatgttccttttttccgtggtgacctcct

SEQ ID NO: 5232 - DNA, 72 bp, Homo sapiens
tcgtgggggagtcaagtctccgtaggcggagagcccggatgcaggcgcggctaggctgccctctctatggtg

SEQ ID NO: 5233 - DNA, 72 bp, Homo sapiens
ctgaaggcatagaaatgctgttttattataaagtccgggccaggaaagaaatagaggatattgataattagg

SEQ ID NO: 5234 - DNA, 72 bp, Homo sapiens
ttctcccctagagccttggagagggcatggttctgcgagagccttgatttcaggcttctggtctccagaact

SEQ ID NO: 5235 - DNA, 72 bp, Homo sapiens
agcactgttatgtgtatggttttgtgaaatccttccgaaagctctgagaattggcccctgtggttagagatg

SEQ ID NO: 5236 - DNA, 72 bp, Homo sapiens
gctgggtgtggtcctcaggtcaacaggcgggtgtgcgagcaggaggtgctgggccccgactgcgatgaactc

SEQ ID NO: 5237 - DNA, 72 bp, Homo sapiens
ggcagcaggaaattgccggctccattcccattaggcggatctggggagaaatcaggaaaaaaataactgtat

SEQ ID NO: 5238 - DNA, 72 bp, Homo sapiens
atcagcaaacattggcctctcaaggttgagaaattcgtgaggaagctgcactcccccactctccagaagcag

SEQ ID NO: 5239 - DNA, 72 bp, Homo sapiens
caaaatagatcctgagactaaatataatcccaacccgtgatcgattcctggggcgctgtctcctttcagagc

SEQ ID NO: 5240 - DNA, 72 bp, Homo sapiens
atgcaaacatttggttagacacattgtctggagctcgagggaataagctaagatgtagcattagatttgaga

SEQ ID NO: 5241 - DNA, 72 bp, Homo sapiens
tttgttttgttttgaatcattcttggggttgaaaacgtagagactgtggtttagatcactcatagaaactgg

SEQ ID NO: 5242 - DNA, 72 bp, Homo sapiens
ctgggtggttccttcagcaatctgctgagctgtggcgattacatcacacactggtgcaaaggccttgaacca

SEQ ID NO: 5243 - DNA, 72 bp, Homo sapiens
tggccgggcccagcacgggcgagagtggccggggacggacgggcacgcgctcaccgagttgtccgtgagtcc

SEQ ID NO: 5244 - DNA, 72 bp, Homo sapiens
aaatcctctgggagtttgtggccacagccagccttcgcccaggggcacggcctcggttcaccgcctgtgtga

SEQ ID NO: 5245 - DNA, 72 bp, Homo sapiens
gcttctgctgtcagggccccagtgtgcacaggagacgtgcctgccccgccgtgcacagacctcagcccccag

SEQ ID NO: 5246 - DNA, 72 bp, Homo sapiens
ctctttatcccttcttactccttctgcaaacagtacgatgctgggcagagtggaagatcccttattgtctca

SEQ ID NO: 5247 - DNA, 72 bp, Homo sapiens
atgtttgagaaacaggtcatggctgagaacatgaccggtaaagcatctcacctgcccccacgttagcaactg

SEQ ID NO: 5248 - DNA, 72 bp, Homo sapiens
ccaagcgcacacttgcttctaagtgctgagatagccgggagccagccagaccatggcctgagtcccacaccc

SEQ ID NO: 5249 - DNA, 72 bp, Homo sapiens
tgtctctgaggcagcccctaagggcccaagcccagcgtgtcacaaagcccagctcagaccagcagtggaagc

SEQ ID NO: 5250 - DNA, 72 bp, Homo sapiens
taggccactctcaagagaggcctgaacaggtttggcgtaaaaacggcagtgaggtgaggctggtgagagggg

SEQ ID NO: 5251 - DNA, 72 bp, Homo sapiens
cggggaacgttcagagggcctgagacccgacccctcggggaagccaggcccagaaatttcagggtgctaccc

SEQ ID NO: 5252 - DNA, 72 bp, Homo sapiens
tccacccaaaaaaccacaaaagatgcagaatggaacgatctaccaaaaaatgaaacggcaggtgtatcaaag

SEQ ID NO: 5253 - DNA, 72 bp, Homo sapiens
aagccgaccaggagtaacccctatccctggcattgcgactttgggcgtatcattaacttgtggggtccttac

SEQ ID NO: 5254 - DNA, 72 bp, Homo sapiens
ctacagtaacctcaaacgagtagtgccactaaactcggatcctcaacattacttagcttctcttctgctctt

SEQ ID NO: 5255 - DNA, 72 bp, Homo sapiens
gagggtccgggggtttcttgcacctgcgctcctgccgcgttaagtcagtgggaagcaagtgacatttccctt

SEQ ID NO: 5256 - DNA, 72 bp, Homo sapiens
ccagtgcctttctgtcactgcaccctgattcatgacgttgtgtgtgctcctgctatcacagcctggccctca

SEQ ID NO: 5257 - DNA, 72 bp, Homo sapiens
gcggggcaaggtagcgcagccgggtgggggtgccccggcagcagggccgggaggggcgtggtgggggggcct

SEQ ID NO: 5258 - DNA, 72 bp, Homo sapiens
cagggaaaggggaggggtggagatgtaggggacaccgtcagaagccagggagaggaagatgaattccaggtc

SEQ ID NO: 5259 - DNA, 72 bp, Homo sapiens
gtcgatgctgaaaggaggccgctgtggtggtgactcggaattagaaccctgactaccttccggagccctggc

SEQ ID NO: 5260 - DNA, 72 bp, Homo sapiens
aaaatcaagtgctgagacaagtggaagatgggccccggtgagcagctgatcagtgtcagctcccatgatgac

SEQ ID NO: 5261 - DNA, 72 bp, Homo sapiens
gtggcatttttcctagggctgttccgagagaacagcggggattgaagggacggaggcaaggagatgcacaat

SEQ ID NO: 5262 - DNA, 72 bp, Homo sapiens
tgagttacttaaacctcctgtgtgtttccccctttcgtatgtcaaaataataacataaaatcagaatgtaaa

SEQ ID NO: 5263 - DNA, 72 bp, Homo sapiens
ttcttccagggtccgcaagcaggtggtgaacatcccgtccttcattgtccgcctggattcccagaagcacat

SEQ ID NO: 5264 - DNA, 72 bp, Homo sapiens
acggaacacagagcaagcctgtctacgagttcagccggtgaggggcaggggctggtgaaggcggcggcgcct

SEQ ID NO: 5265 - DNA, 72 bp, Homo sapiens
tgcgcgccgcggggggtcggagggcgcaccgatggcggggacacggcggcgctcttcagttgcgcaattatg

SEQ ID NO: 5266 - DNA, 72 bp, Homo sapiens
atcctgtcctgccctgacccctgcagctcggtgaacggaaaggactcagatggggctgagttcgtcctctgt

SEQ ID NO: 5267 - DNA, 72 bp, Homo sapiens
tcaccatggagccctagaatgaagggggggaagcacgaaggctggctccctatcaatggtgtgacttccttc

SEQ ID NO: 5268 - DNA, 72 bp, Homo sapiens
gaggtttctacttgagagaaacacaaatatatgttcgcacgtacttgcacaggaatgtgcatagcagcatga

SEQ ID NO: 5269 - DNA, 72 bp, Homo sapiens
gtcactcaggagcacagtgttggtacatctctctgcgagctaaaactgctgaagaaagctgtatgaaatgaa

SEQ ID NO: 5270 - DNA, 72 bp, Homo sapiens
tactatccgattgccattttttattcccccttcgccgcccccccaggctgagccacgttgagtaaatgcatg

SEQ ID NO: 5271 - DNA, 72 bp, Homo sapiens
acaggaaccctgcagagggtgagctccgggctcttcgccagctgcggacaccgcaagctgtgacgcagtccc

SEQ ID NO: 5272 - DNA, 72 bp, Homo sapiens
cgagtcactgtgaaaagatgggaaattatctcctgcgaaaactcaggtgagtcttgactcttggtgccgcct

SEQ ID NO: 5273 - DNA, 72 bp, Homo sapiens
gagaagacttggcccaaccttcttaggcgcctcctcgttttcttaggaagtgaatgtgccttctctgggccc

SEQ ID NO: 5274 - DNA, 72 bp, Homo sapiens
tggaaattgcttcaggtcactgcactatcttccaacgtttttgtggttgccatgagctgttgtacagaccac

SEQ ID NO: 5275 - DNA, 72 bp, Homo sapiens
ttagattcagtcaggtcttagcaatttttcctgctcgtctccacccccttctctgactcttgtcctttccac

SEQ ID NO: 5276 - DNA, 72 bp, Homo sapiens
gggaggcaagggttcgcacggcagtgcttctgtgtcgacagaggctgtgctgcagctccctgccaggcccgt

SEQ ID NO: 5277 - DNA, 72 bp, Homo sapiens
agaaggagagggattgacaagagccaaggggcggacgtgggagggatccagatgaccccatttactcagagg

SEQ ID NO: 5278 - DNA, 72 bp, Homo sapiens
ggggccgccccctggaaccactgtcccgctgttgccgtaaacacacaatggcattgccggagttgatcatat

SEQ ID NO: 5279 - DNA, 72 bp, Homo sapiens
attaaaatgtcaaggcacattgaattgttgttatccgggagagagacctttccaatcaacctgtgttgtggg

SEQ ID NO: 5280 - DNA, 72 bp, Homo sapiens
cttgctgccaatgaagacttcccctcgggcgaaggcgtcctgtgggtggggaccgcactggaggcggggcca

SEQ ID NO: 5281 - DNA, 72 bp, Homo sapiens
agaatatgcttatagggacaaagtctcccacatcccgtcccctggatccccctacagccccctgctgtccat

SEQ ID NO: 5282 - DNA, 72 bp, Homo sapiens
agcaagtatccagaaatgatcaaagttctttttcacgattgtactttgctaagctcctgtgtctctggagct

SEQ ID NO: 5283 - DNA, 72 bp, Homo sapiens
ctaagttctattctcagctgctccaaggaggctaccgaggcctcagctggagttggcccctcctcggctcct

SEQ ID NO: 5284 - DNA, 72 bp, Homo sapiens
aacgcaaacacatgcgaggcaggaagcgtctacagcgctcccgttcctgcgcacgcaggcccgtatgcatgt

SEQ ID NO: 5285 - DNA, 72 bp, Homo sapiens
gtagggttgttctagagattgtcagaccgagaccacgccacacacccagaaggcacccaagtcacagagcct

SEQ ID NO: 5286 - DNA, 72 bp, Homo sapiens
aaataactgaatgctgttgttcattactgagaggacgctttatttccttgtgcaaaagagcatttcaagtca

SEQ ID NO: 5287 - DNA, 72 bp, Homo sapiens
aagatccgcggtgggaaacagttcattttgcagtgcgatgtgagtgggggctgagccagggatgggagggcc

SEQ ID NO: 5288 - DNA, 72 bp, Homo sapiens
ggtctcgccggctcaggagcgaagctgcggactttcgcggtgagtgttacagctagctcttaaggcggcgca

SEQ ID NO: 5289 - DNA, 72 bp, Homo sapiens
tgaaagagagagtttgaccctttaagacaggaaatcgttttggccaccgcctcttgttctaactgaagaagg

SEQ ID NO: 5290 - DNA, 72 bp, Homo sapiens
cttcctctacataccccatttatctctggcccccacgtctgcttgggctgcaatcagttcttcaaccaggtc

SEQ ID NO: 5291 - DNA, 72 bp, Homo sapiens
tctgggcccaggccaaagctaaggtgtgtgggtggcgactgggggaccctggcagtcccagggctgcccagg

SEQ ID NO: 5292 - DNA, 72 bp, Homo sapiens
cccctgtagtccctcagcagcctaaggagcagttccgttgggcatcgccccacccatctaattttgcagatg

SEQ ID NO: 5293 - DNA, 72 bp, Homo sapiens
tggccacagccagccttcgcccaggggcacggcctcggttcaccgcctgtgtgaaaacagcagcaccaactc

SEQ ID NO: 5294 - DNA, 72 bp, Homo sapiens
tcaatcagatcaacaagtgttggctaagtgttgagcgtggtttcctgtgggattgtgtaaggctctgtagga

SEQ ID NO: 5295 - DNA, 72 bp, Homo sapiens
tagtgactacccagggcttggtaagtgctcagtaacgtttgttgaaagatgaatcaatatttcaatgctggg

SEQ ID NO: 5296 - DNA, 72 bp, Homo sapiens
gcttcaccacaatttacttcattagttttgcagtacgtaagacatatgattaatttcacttcatggtattag

SEQ ID NO: 5297 - DNA, 72 bp, Homo sapiens
gtaaatggactagaactaatcctgtagctaaacagcgagggctttagaaaaggaaacacctcacttgcctaa

SEQ ID NO: 5298 - DNA, 72 bp, Homo sapiens
cctgtggccactaaccacatacgcagctcttgaaacgtggttactgcaactaacaaatagaattttttactt

SEQ ID NO: 5299 - DNA, 72 bp, Homo sapiens
cagcaggaagtggctggccccttcccaccccctgccgagccaggccctcctgcactcacacttgggaaccag

SEQ ID NO: 5300 - DNA, 72 bp, Homo sapiens
gagttcagtagcaaactggcataacgttgaacaaccgtgcgttaagtactcttgacaaactgggggccggaa

SEQ ID NO: 5301 - DNA, 72 bp, Homo sapiens
tcaaatgtgtgatacaggcaaagggctggaagagccgtgaggaggggtccacctggggtgcatggaaagggc

SEQ ID NO: 5302 - DNA, 72 bp, Homo sapiens
gggtcacgtggatgttcatgaggtaatatacgatgcggctctggatgtggtcagccacacggttcaccacgt

SEQ ID NO: 5303 - DNA, 72 bp, Homo sapiens
cagccccagccccatggcaggcagctcggtgggagcgctcgggttcgtctggcccccacagctcccaacccc

SEQ ID NO: 5304 - DNA, 72 bp, Homo sapiens
tcccaccaacaattatgtgagttccaagttctccacgtcctcactaatgtttgttattgtctgtctttttta

SEQ ID NO: 5305 - DNA, 72 bp, Homo sapiens
ctcctggagtgaagcaatcaaagccaagaagggagcgccgagaaaacagaagttgccaatcagaactgccct

SEQ ID NO: 5306 - DNA, 72 bp, Homo sapiens
tgccgccgctgggcctctgtgtggattctgtggcacgggtgggatagtagcctgggccacccagaacgctgg

SEQ ID NO: 5307 - DNA, 72 bp, Homo sapiens
ccctgcagccttgaatgtgagcacagccctgtggacgctttggttccagacgtctagcctccagaattggaa

SEQ ID NO: 5308 - DNA, 72 bp, Homo sapiens
ggtttcttggcaaattagccaacacatcagggtctcgagtatgcaaataatggaagactgacatggaagtag

SEQ ID NO: 5309 - DNA, 72 bp, Homo sapiens
gtcacttcctgcctttgtccattagcgccgaccaacgcgaccagctccgtttacattctttcagtggtgttg

SEQ ID NO: 5310 - DNA, 72 bp, Homo sapiens
gcaccgtgtgggggcagcgggcgggcaggtgcagacgtttcacgcatgtctccactcacactgcttgccaca

SEQ ID NO: 5311 - DNA, 72 bp, Homo sapiens
tcaggaacatgaagcaatgggtaaagggcacagggcggcctggcaaagtcccatggcaagaatggggagagg

SEQ ID NO: 5312 - DNA, 72 bp, Homo sapiens
cctgacagtctgtggcctgcacctgggggcctgagcggccctgtttgctctgtcttccacctgttgcaggag

SEQ ID NO: 5313 - DNA, 72 bp, Homo sapiens
ggctagaggcgcacacgtttcatctaggcttcgggcggggcgcagcaggtgggtgaggctgcggtggtggct

SEQ ID NO: 5314 - DNA, 72 bp, Homo sapiens
tgctgctcacagagatggtggcctggctgggtctgcgctaggctgccctgttctgccttctatcctctagtc

SEQ ID NO: 5315 - DNA, 72 bp, Homo sapiens
accaaacccagattccaggtgtggtattccacagtcgttctgtaatttgtaatcatagaaacagaatgttcc

SEQ ID NO: 5316 - DNA, 72 bp, Homo sapiens
tgccttccctttcgtccccctcccccaggatgccccggaggcccagctagccccagacttcggccccatgcg

SEQ ID NO: 5317 - DNA, 72 bp, Homo sapiens
ggaagagaaaggttctctgttcattgtgagaagaacggtgaattatgagcaagagaggaaaaggttgctttt

SEQ ID NO: 5318 - DNA, 72 bp, Homo sapiens
ttcttttctctgctccttgggacaaccccccaccccgagtgacaacattacgtacaaaactgctccacacac

SEQ ID NO: 5319 - DNA, 72 bp, Homo sapiens
caggaagttgaggctgcagtgaactgtgatcatgccgctgcaatccagtctgtgcagcagattgagattctg

SEQ ID NO: 5320 - DNA, 72 bp, Homo sapiens
tgaactcaggatagctgggggttggttgcgatggacggcacgacggtctgcagtggggatccaggatcccag

SEQ ID NO: 5321 - DNA, 72 bp, Homo sapiens
gtgctttggtcaaggaataggccgaggcggacatccgggccagagtgactcagcgagtttggggggcaggca

SEQ ID NO: 5322 - DNA, 72 bp, Homo sapiens
ctaacgaccattgttcgggggcaggagtgggtgcccggaagcatgggtggtagtaggggacccacagctgca

SEQ ID NO: 5323 - DNA, 72 bp, Homo sapiens
agtcctaggctctgccgtcccccagcccctcacctcggtgctctgcaaatgctgaatttctacgctgtaggc

SEQ ID NO: 5324 - DNA, 72 bp, Homo sapiens
acaactctgccaaagccacaatttaataggtacttcgttctgagtgatgacaggtaattattttgccatcac

SEQ ID NO: 5325 - DNA, 72 bp, Homo sapiens
aggcctccagacctacgcgctgaagacagaggggtcgctctgatagcggggacgccaaggcccctctgcgct

SEQ ID NO: 5326 - DNA, 72 bp, Homo sapiens
aactggccggtgggtgagcaggtgcgaaaggaaaccgagaaaacccggggggtactttgtgggttaaaagag

SEQ ID NO: 5327 - DNA, 72 bp, Homo sapiens
ggttttgctgtgataaccaaggaagctgacggccccgggcttctgtgtttgcagagagcttacagaaaagtc

SEQ ID NO: 5328 - DNA, 72 bp, Homo sapiens
atataagaggccaaggaagtggccaaggaattagccgtaggggttcctggtttccctatcagggccctctct

SEQ ID NO: 5329 - DNA, 72 bp, Homo sapiens
cacgcccctcccctcgcttccttggcctggtttcacgcgactagagaaagttaaagacccgtgtgactgaag

SEQ ID NO: 5330 - DNA, 72 bp, Homo sapiens
cccaacctctccactagatacgcacacttagctcacggtctgcctcatgagtcatcccagttgagctttacc

SEQ ID NO: 5331 - DNA, 72 bp, Homo sapiens
agggaccggtcggggaatccgcaccaggggcgtagcggaggcgggattcgaacgcgggaccctctttccccc

SEQ ID NO: 5332 - DNA, 72 bp, Homo sapiens
ctcgctctgtcgtccccaggtggaggaggagctgacgcacctccagaagaaactaaaagggacagaggacga

SEQ ID NO: 5333 - DNA, 72 bp, Homo sapiens
catttcctatacttttcatagagacaaaactttagcgctcacaaaagtacttataaatataatagctagttg

SEQ ID NO: 5334 - DNA, 72 bp, Homo sapiens
acatggaaagagaggactgaggtgggcagggtatccgcgggactctgctgtcctctggactctcccagccat

SEQ ID NO: 5335 - DNA, 72 bp, Homo sapiens
ttctccccatctcttctgtcccgtcttccttctgtcgttctgtcttctccccatcttccttctgtcgttctg

SEQ ID NO: 5336 - DNA, 72 bp, Homo sapiens
gccggtgtcagctttctgcctcccgctgcaggctccggttcgccagcctggtgcccatgcaactcagaaact

SEQ ID NO: 5337 - DNA, 72 bp, Homo sapiens
cgagctctgacctgcctgctggctctcagctctgccgtctggagtatccaggacaccttggaagcagttgtg

SEQ ID NO: 5338 - DNA, 72 bp, Homo sapiens
catttactctgtctcaggtatgatgcaatgcctttcgtaatttatcatctcatttagttctcacaacgaagt

SEQ ID NO: 5339 - DNA, 72 bp, Homo sapiens
gccgggaattcctgtctgcatttgtcttgacttggcgccatctagaggtgcgtgaaatcctgccacccggca

SEQ ID NO: 5340 - DNA, 72 bp, Homo sapiens
tcagagactgttgtggtgtcactccgtgtggtgagcgtgcctcctttgtggtgtgggtggcctatggtggtg

SEQ ID NO: 5341 - DNA, 72 bp, Homo sapiens
agaggccgagaggaaggccagggtgtagccaggggcggaggaagcttccagacctgctgtctataaaattga

SEQ ID NO: 5342 - DNA, 72 bp, Homo sapiens
ggcccctgggcttctgcattgggtggcgtcctctgcgttgggtggcgtcctctgcgttgggtggtgtcctct

SEQ ID NO: 5343 - DNA, 72 bp, Homo sapiens
ccaggcctgcccgagggagggggctgtgggcccctcgccattcactgctaagcctggatccgggcgcctttg

SEQ ID NO: 5344 - DNA, 72 bp, Homo sapiens
actacttgaggatggagctcactctcttcagcttccggccctcaacagtggcatctgtaaaggacctcccag

SEQ ID NO: 5345 - DNA, 72 bp, Homo sapiens
aagcgactagaatgccctctttagctgggggtgttcggcctccttttttggaggtgggttgtgatgtcaaaa

SEQ ID NO: 5346 - DNA, 72 bp, Homo sapiens
aggaagtgctggaacagcagaagcagctagcagtgcgctcaagaagtggtcagcagttgggagcagctggag

SEQ ID NO: 5347 - DNA, 72 bp, Homo sapiens
gaaccacgtgaggcgggctggagacagggaaggcccggaagccagctcagatgcccagggcacagccagaat

SEQ ID NO: 5348 - DNA, 72 bp, Homo sapiens
cgaagcacatttgagcgacgtgacattccttacctcgcggcagcaaggcaactgcccacttcctttcgagtc

SEQ ID NO: 5349 - DNA, 72 bp, Homo sapiens
cccgtttgctcagggctctgactgaccaccatgcccgaattgtctgacagcatctacttacctggttgtaca

SEQ ID NO: 5350 - DNA, 72 bp, Homo sapiens
cttcctggtagcccctctgcacccctctctcctcacgtgtcctgttggtcagtgatccccagaagggctggg

SEQ ID NO: 5351 - DNA, 72 bp, Homo sapiens
gggctgacagtttgctccccaggcaccaccactcccgcctcccaccttaaccttgcatgagtttaccttgag

SEQ ID NO: 5352 - DNA, 72 bp, Homo sapiens
atactctgagtcatagatacagatttcctgacctccgatgagtagcagcagctcaagttttccccgttaata

SEQ ID NO: 5353 - DNA, 72 bp, Homo sapiens
ccaaccagtaattacatcataaagagacaaaagtccggaatttcctcctggcagagcatagaagtaagaaat

SEQ ID NO: 5354 - DNA, 72 bp, Homo sapiens
atggatacccagacctttttttcttttttggagaccgagtcttgctctgtcacccaggctggagtgcagtgg

SEQ ID NO: 5355 - DNA, 72 bp, Homo sapiens
acagtgtctcagtagtgacagatgctggcccaccccgaggtcaggatgactcagcagggatcgagtttgcgg

SEQ ID NO: 5356 - DNA, 72 bp, Homo sapiens
aaaacgtgttggaggcacagtacccacctctgccgcgtctgaacccagatttgccaggaaggctcttgcttt

SEQ ID NO: 5357 - DNA, 72 bp, Homo sapiens
tcaggggcctcaaggggtggcactcttccttaactcgtaactcttggaggcaagcttggaaggtgctttatt

SEQ ID NO: 5358 - DNA, 72 bp, Homo sapiens
gggaccccggctgagagaagccagagccagagagtcgcaggcttgcttgctcttatcttccctctgctgggg

SEQ ID NO: 5359 - DNA, 72 bp, Homo sapiens
actttgagtaaacacagcctcccttctgccctctgcgtagctgcggtgtaagtttcacaatgcattttcaca

SEQ ID NO: 5360 - DNA, 72 bp, Homo sapiens
tctgtgacatattcattattttcctagtaatgaaacgggaactgtgagacaccatgtgaaaaggcggctttt

SEQ ID NO: 5361 - DNA, 72 bp, Homo sapiens
ctgcccatcacaccgccagctcagtgccacccagacgctcccaggccacccatgtgtgccctgacccctcgg

SEQ ID NO: 5362 - DNA, 72 bp, Homo sapiens
gataaaccaggggcacaggcccccagcgcagccaccgccacttactgcagccagggaggctccccaggagaa

SEQ ID NO: 5363 - DNA, 72 bp, Homo sapiens
ataaagatggaaagaaccagaggagctcattcaggcgggtatagtccaagcctatctggggaaccagaatag

SEQ ID NO: 5364 - DNA, 72 bp, Homo sapiens
ttgttgttgttacacacagtagtccccaccttatccgcggtttcactttccacagtttcagttacctatggt

SEQ ID NO: 5365 - DNA, 72 bp, Homo sapiens
tatgatgaccaggcagcattgagcaactctgactccgccttcccctcttcgcacaccttctggttactgaaa

SEQ ID NO: 5366 - DNA, 72 bp, Homo sapiens
ttctaggcggcttatgacccctacgcttatcccagcgactatgatatgcacacaggtgagaccacgggttag

SEQ ID NO: 5367 - DNA, 72 bp, Homo sapiens
agagggaagaagtggtcaattgcaaaggtgctacccggacctggaactaaaaccagacacagactccctgct

SEQ ID NO: 5368 - DNA, 72 bp, Homo sapiens
gaggcctgggctggtttccagcatggcaagtgcagcgctgccaggccagccccgagacaggcccagacacac

SEQ ID NO: 5369 - DNA, 72 bp, Homo sapiens
cctcactggtatggtgaagaaatgttatccaacagcgtgggtgtgggcactgcccaaattctttaccctgga

SEQ ID NO: 5370 - DNA, 72 bp, Homo sapiens
cttggcaaccacacttcagttttgacacagtctttcgaggaattcctgaaattagtttccaaaactgtaaat

SEQ ID NO: 5371 - DNA, 72 bp, Homo sapiens
atgctcagagaagcagggccgcgtggagtgcccagcggaacctgctcatgctgatttgctgcgtcaccttgg

SEQ ID NO: 5372 - DNA, 72 bp, Homo sapiens
agccaggggctctctgcctgggaggacaccttcggcggctggcgtggggaaaggggccgcccggccggggat

SEQ ID NO: 5373 - DNA, 72 bp, Homo sapiens
ggccagacctggggctagccagggaaaggcctgaacgtcggaggaggcagtctccagggccgccaagtgagg

SEQ ID NO: 5374 - DNA, 72 bp, Homo sapiens
cttgaaacttcatctgatttctcaatctgaagtctcgcaatggagccccaccatagaacaggaataggaagg

SEQ ID NO: 5375 - DNA, 72 bp, Homo sapiens
gaaggtgacttcctcagaaagtatggatatgaacacggttggtaattctgagggaagtgggcagaacacatg

SEQ ID NO: 5376 - DNA, 72 bp, Homo sapiens
acttctccaaccttacgcaatgcccttctcacccccgtcaagtcctgtaatactgccccagcttctgtgagt

SEQ ID NO: 5377 - DNA, 72 bp, Homo sapiens
aagcctggcattgcctcacagaccttcctcagagccgctttcagaaaagcaaggtaagcagggacggggaca

SEQ ID NO: 5378 - DNA, 72 bp, Homo sapiens
agttttcgggaagtcagatgaccttttccctcccgcggctctctacctctcgccgcccctagggaggacacc

SEQ ID NO: 5379 - DNA, 72 bp, Homo sapiens
atccactttcaagatgactcaccctcctggcaagacgatgctggctgttggcaggaggtctcagttccctac

SEQ ID NO: 5380 - DNA, 72 bp, Homo sapiens
agaatgggagtgcctactcctccctcaacagctgacgtaaaagggagaacttcctggaggccagccaagagc

SEQ ID NO: 5381 - DNA, 72 bp, Homo sapiens
caccagcgaaggggagggccccagagagcacgagacggatgaggaaccagcaccagtaaaggccctggagag

SEQ ID NO: 5382 - DNA, 72 bp, Homo sapiens
gtatctggcttagcgaatatggggaggggggaggccgtagggagcaaagagaaagaaacctgttgacttcac

SEQ ID NO: 5383 - DNA, 72 bp, Homo sapiens
gaggactcagcttgaggaggtcactcgttcacagccgctcctcccattatatttttccccttattgcagaac

SEQ ID NO: 5384 - DNA, 72 bp, Homo sapiens
cagcagcttcatcagggttccttccaggctggcctcgtgtcggccgtgaagggaagggccttggagcttggt

SEQ ID NO: 5385 - DNA, 72 bp, Homo sapiens
gcccctcctactcaggataagactttctctaagtccggagctgaaaaaggatcctgactgaaagctagaggc

SEQ ID NO: 5386 - DNA, 72 bp, Homo sapiens
gacccagaatggtccttgccctctgggagctctcccggtaactgggaccacaagatttgcacctggaagggc

SEQ ID NO: 5387 - DNA, 72 bp, Homo sapiens
ggcaggctggggagccagggtcagccagggcacgccgctgagatgtctttcctgctccttctccccgggaag

SEQ ID NO: 5388 - DNA, 72 bp, Homo sapiens
ggccaggcgggtggccgaggtttcctgatcagggacgaggatgctcccagggccagcaaggccacgggggca

SEQ ID NO: 5389 - DNA, 72 bp, Homo sapiens
tagtttatgtccccggtggggcacacagcggggggcgccaggttttccttgtcccccagctgctctgcccct

SEQ ID NO: 5390 - DNA, 72 bp, Homo sapiens
aggcattgcctggcaaaaccttgcaagccagtgtgcgtcacaataccctttgaatgatgtaaaggaatcagg

SEQ ID NO: 5391 - DNA, 72 bp, Homo sapiens
tggggagagggtacggggccgcgggagagaaatcccggaccctgggactatgcagcccgtgagggccccagt

SEQ ID NO: 5392 - DNA, 72 bp, Homo sapiens
tgctgacagatgtgaaacgtctggcctccatcacccgggtcgccccgacaaggatctgtaatgggggcaggg

SEQ ID NO: 5393 - DNA, 72 bp, Homo sapiens
gtggagcaaagacattttgtttagcaggacttcaacggcaagagcgccagccaccaggacttgcgtgtggca

SEQ ID NO: 5394 - DNA, 72 bp, Homo sapiens
aagctctgcaaacttgagcagtcaaccaacttcaccgctcacaaacgtttggccgctaggcattgtgacttt

SEQ ID NO: 5395 - DNA, 72 bp, Homo sapiens
ctacaaaagtgaggccgaagagaggaagcctgagccgagtgatgattgatccctgtgacatcacagaaggac

SEQ ID NO: 5396 - DNA, 72 bp, Homo sapiens
gcagccaggacatggacatgtgacttgagatcagccgactagagatctcagctaggactaggaagctggagt

SEQ ID NO: 5397 - DNA, 72 bp, Homo sapiens
aactcatccctaaagcaaaatactggtctcagggccgggaagtgcagcttcagacgcaagccagatgaggca

SEQ ID NO: 5398 - DNA, 72 bp, Homo sapiens
ttcttgtggaggaaggaaggtcaagaaggagctcccggcagaccagggttcgctgcgcccagagacctgccc

SEQ ID NO: 5399 - DNA, 72 bp, Homo sapiens
ctcgctggatggctctgtggagagacgcgatgactcggagctgagggaggaggaagagcagggggaagatgg

SEQ ID NO: 5400 - DNA, 72 bp, Homo sapiens
tcactgaagagttcttggaccaaaacaaaggtgagcggtaactgcgctcctgatgcgaactccgtgaaactg

SEQ ID NO: 5401 - DNA, 72 bp, Homo sapiens
ccgaggtgcggtgaggcctcctcccgacctggccgcgtcctcagagttcgctcggggcttcgtgtttgcaga

SEQ ID NO: 5402 - DNA, 72 bp, Homo sapiens
ttggctgaatttcatgggaagtccctgaactcggccgtggagaggggatgcaggacacccccattcctagag

SEQ ID NO: 5403 - DNA, 72 bp, Homo sapiens
tgttgccgtttgtttgattgattgatcttggaccacgaaagaaaattatactgacagcttccagggtagggg

SEQ ID NO: 5404 - DNA, 72 bp, Homo sapiens
accagggactatttttatctggtgcctgaggccagcgggacaggctaacaggtgccccagcccctcccaggc

SEQ ID NO: 5405 - DNA, 72 bp, Homo sapiens
gcctcttagttattagtcgctacccaaccagctgtcgttcagccctggggcttttccatttccgactccaaa

SEQ ID NO: 5406 - DNA, 72 bp, Homo sapiens
agccaggagaaaaaaatgcgcgtttccccggggtccgaggaatgacacaaccacattccgggtttaaaatat

SEQ ID NO: 5407 - DNA, 72 bp, Homo sapiens
agtccctaatcagcaatgtcagctgaggacacgtccggtccacattatatttaatgatggtctagcactgtc

SEQ ID NO: 5408 - DNA, 72 bp, Homo sapiens
aggaaatgccctgagacttagtctgggtccactcacgcttgttttggttaagaaaccacccccaggcgcttt

SEQ ID NO: 5409 - DNA, 72 bp, Homo sapiens
aggccaaggggccagcttgtggcaggctagctaagcgtgtgagggggagggtggggcttagatggctgctaa

SEQ ID NO: 5410 - DNA, 72 bp, Homo sapiens
cagtggcgcgatttctgctcactgcaaccttcgcccgcggggttcaagcgattctcctgactcagcctccca

SEQ ID NO: 5411 - DNA, 72 bp, Homo sapiens
gcagcgaggaggagccacagggctgagctcggttgcggcgcagccccgccgcagtgcgcaaagccatattcg

SEQ ID NO: 5412 - DNA, 72 bp, Homo sapiens
gcctatttcagatttattaaaaaacacataggtaacgagtcagagctttggctaggaatgatttggaaaaga

SEQ ID NO: 5413 - DNA, 72 bp, Homo sapiens
cttaacttgttgcaggcttccctttgtttgcagcccgagaagaaaatcatgtgaccagaaactgaccaatga

SEQ ID NO: 5414 - DNA, 72 bp, Homo sapiens
atggacaggaactggctgtgggtggagacagcacccggctgaggtcctggggaagaggccatgcccggagct

SEQ ID NO: 5415 - DNA, 72 bp, Homo sapiens
atgaggtggcaagatttgcaactggcattcccttccggccctgccctgtgattcaggtcagtggtgtgacaa

SEQ ID NO: 5416 - DNA, 72 bp, Homo sapiens
gacatatgaaagagatgtgacagtgacagcttcctcgctaattttgaaatctggctctcgagaagaataggc

SEQ ID NO: 5417 - DNA, 72 bp, Homo sapiens
agtttcctcatctcccattagaaagccctgactcacgcaagctcactgagtctcatcctaccccatgcttct

SEQ ID NO: 5418 - DNA, 72 bp, Homo sapiens
gaacctcctggaccaaagggatggttgagcctagccggtggactggccactaccagggggcacagggctcgg

SEQ ID NO: 5419 - DNA, 72 bp, Homo sapiens
gacccttcagtgggccctggtcccaaggtaggcaacgccagtcaccctccacctgactcccgcaacaagacc

SEQ ID NO: 5420 - DNA, 72 bp, Homo sapiens
gagttttacactttaaaatggtgaaatttaggttacgtatattttacaattaaaaaaatgaagaaggctgga

SEQ ID NO: 5421 - DNA, 72 bp, Homo sapiens
tttaaatttaaagtgagacattcgtccaataaaatcgatttcaaacttggtggtgtttggcttccctcttct

SEQ ID NO: 5422 - DNA, 72 bp, Homo sapiens
caaaagtgcccaaaaaatggactcagatgccccctcgcatctgagtattcctgacagcatgtgaacattaat

SEQ ID NO: 5423 - DNA, 72 bp, Homo sapiens
ctagtcctcattttacacatagggagcctggtggacggaactgggaagcaatgtgtcagagtacagtatgtg

SEQ ID NO: 5424 - DNA, 72 bp, Homo sapiens
ggttcacacaaatagccccacagttacatgcttctcgagtgtcctgtctaccagctgtgtaggctctacctg

SEQ ID NO: 5425 - DNA, 72 bp, Homo sapiens
gtgtgtgcaggaagcggaggcgcaggacctcaccgcgccagcgtgaagttcccgggcatggtcatgaaagcg

SEQ ID NO: 5426 - DNA, 72 bp, Homo sapiens
cagattctgggggtcgttcaggttgaaagactggtcgaaattacgcgggcatgagtcagcgcatccctacgc

SEQ ID NO: 5427 - DNA, 72 bp, Homo sapiens
cttattgaaagaattaataatagacgtagaaccaacgggcttagtaagcccctggagaaaggaatcaaagat

SEQ ID NO: 5428 - DNA, 72 bp, Homo sapiens
ctcaggacatcccaaccatgccccttggaaggtcccggactgtacttccccacagcaaactgctgacatcag

SEQ ID NO: 5429 - DNA, 72 bp, Homo sapiens
gggctttggcaatcactaggttctccatcatctgccgctgtagagagagggtctggggggggaggagggagt

SEQ ID NO: 5430 - DNA, 72 bp, Homo sapiens
tgtccatctcacccggaacgtggtgcttttttaaacggagtccacctttactacattattgttggtcatcag

SEQ ID NO: 5431 - DNA, 72 bp, Homo sapiens
cccgcgtccagggagtctagaaccttgggctcccgcgcacacccaggccaggtcctggccgtcattctcccg

SEQ ID NO: 5432 - DNA, 72 bp, Homo sapiens
ttgggagtgagggagagagattcctagggctacttcggtggtggttgggtccccaagctccaagactgagtc

SEQ ID NO: 5433 - DNA, 72 bp, Homo sapiens
atgcggattttctccaattgagtaatacatctgaccggtcaagaaacggggtagaaggcttggaaagtccag

SEQ ID NO: 5434 - DNA, 72 bp, Homo sapiens
atgacaaagcccaaggaccccaagaccatcatcctcgactcttccccttcctctatccacagctcatacatc

SEQ ID NO: 5435 - DNA, 72 bp, Homo sapiens
ggagttgtacaaatagacaacagtctgctctagcccggctctcttcggccctgtgcctgccacaaactcagc

SEQ ID NO: 5436 - DNA, 72 bp, Homo sapiens
gcactcgagtgacctcagaatgtggttgtgagtctcggtcaggaagaacaaagcacactaatctccctggac

SEQ ID NO: 5437 - DNA, 72 bp, Homo sapiens
cgcggcgcccatttgcacacgctacacaaatgcatcgcattcccggttgtttgcagaaaatttacagctgag

SEQ ID NO: 5438 - DNA, 72 bp, Homo sapiens
agcgtatgtgggtatgtgggtggtggctgcagtggcggcagagctgcatgtcagcatgttgattcagtagaa

SEQ ID NO: 5439 - DNA, 72 bp, Homo sapiens
agctgctcagcgccacacccaaacctgcagctgcgcgtcccagcagatctcacggcaagacgtggggtcaga

SEQ ID NO: 5440 - DNA, 72 bp, Homo sapiens
gacagataccccaggttccttcctgtcttcctccccgccaccccagtgtgttacagctgatttgtacagccc

SEQ ID NO: 5441 - DNA, 72 bp, Homo sapiens
gcttttccaaactaggtcccaggaagcactggtttcggcgagtgttaccagatctcctgcaggggagaaacg

SEQ ID NO: 5442 - DNA, 72 bp, Homo sapiens
tttcggacatcattcccccaagcaatagagcacaacgaatgactgacaagcatccagttgtatgtctcagga

SEQ ID NO: 5443 - DNA, 72 bp, Homo sapiens
cagggctcaccagcgcctggcgatgcctacccttccgctttggagactggaaattcggttaactgagtttca

SEQ ID NO: 5444 - DNA, 72 bp, Homo sapiens
acaggaagatctaattctggaagacatacaaatgccgaaaggaaaattaaagccacttaccccgaggaagag

SEQ ID NO: 5445 - DNA, 72 bp, Homo sapiens
aatctctctctgaagaaggacagagtggccacacgcggttcctgggatccagcctctaaccctcggaacaat

SEQ ID NO: 5446 - DNA, 72 bp, Homo sapiens
caaatatttgtcggaggcattatcaaggatcaaaccggtttgatccagtgcagtgcaggaaacgcgggcagg

SEQ ID NO: 5447 - DNA, 72 bp, Homo sapiens
gaggcctgagggatgaagtagccatccctggaggacgggggcacccactggctgattaatgtaccatggtgg

SEQ ID NO: 5448 - DNA, 72 bp, Homo sapiens
tgaggacgtaagttcctgaccacacgggacacgggcgtgttcttgggttttgggcaatggaggagaaaaagg

SEQ ID NO: 5449 - DNA, 72 bp, Homo sapiens
agcaaaaatgaaaatcttgcacaatcacaaatgggcgcccaggactgtatgttatttgtcaatcctgtgatc

SEQ ID NO: 5450 - DNA, 72 bp, Homo sapiens
cagctgatgcctgttactgctggggctgagctcagcgatccagcccacccggctaatccaggactttttttt

SEQ ID NO: 5451 - DNA, 72 bp, Homo sapiens
gtcttgcatatgcatgctttggtcacaaagattggcgtggggagagaacgtggacaaactcatcaccactaa

SEQ ID NO: 5452 - DNA, 72 bp, Homo sapiens
gacactgtgccaccccagcctggggctggctctgccgccacacacaccacacagaaccggtctgcgtctcca

SEQ ID NO: 5453 - DNA, 72 bp, Homo sapiens
aatatccggagataaggaggaactacatggaagagcgtgggctctggtcatgttcctccaagaagaggatgc

SEQ ID NO: 5454 - DNA, 72 bp, Homo sapiens
gagactccatggaggcccacacccagggctgccctcgcggccgctgggccaggggcaggtgggaccgccggg

SEQ ID NO: 5455 - DNA, 72 bp, Homo sapiens
taatgtactcacaacaaatgcttgcatcaccccatcgcaactctccttcttaacaatgaaggtaaaactcag

SEQ ID NO: 5456 - DNA, 72 bp, Homo sapiens
gacctgcacgttcagagcccgccccaccctcccgccgactgccagccaatcaggcgcgagcctggccggggc

SEQ ID NO: 5457 - DNA, 72 bp, Homo sapiens
ttgaaagtataatccccagtgcaacagtgtaaagacgtgccctctaagaggtcactaggtcataacggccct

SEQ ID NO: 5458 - DNA, 72 bp, Homo sapiens
ggcctctggaagtggacttgggacaatgcccagcccgggcccctgctgacattctcctgtctgctggtgccg

SEQ ID NO: 5459 - DNA, 72 bp, Homo sapiens
gaaaagttctatgtgcgcttgaccggggggccttacgtacgtgaattgggtgagggcctgagacaggcgggt

SEQ ID NO: 5460 - DNA, 72 bp, Homo sapiens
gccacctaggggttctaggtctgcatgttcccaatcgccactgtgcttccccgggccacaggatgctgaggc

SEQ ID NO: 5461 - DNA, 72 bp, Homo sapiens
ctcgtgcagtgtagatgcatgcatgtgctgaagggcggcctctgggaagggaggggtccttccaggccgggc

SEQ ID NO: 5462 - DNA, 72 bp, Homo sapiens
gcttgccttcagctgaccactattcttaagagtctcggttggcactaagcaatagctatccaatcccccttt

SEQ ID NO: 5463 - DNA, 72 bp, Homo sapiens
tttcctacccgggttctcgctgaaatgagtaaggccggagatggctcaggaaagccaaaatatcacctagat

SEQ ID NO: 5464 - DNA, 72 bp, Homo sapiens
cttgtgcgcactgctgtgaggcatgacaagcttcccgttcttcctccacgtgatagtcacttctgctggata

SEQ ID NO: 5465 - DNA, 72 bp, Homo sapiens
ggatctttctgccacatttgggtgcctcccgcgagcgcaacacacaccgtgggtgcgaatgagggatgccag

SEQ ID NO: 5466 - DNA, 72 bp, Homo sapiens
ggaaaccccacatcgtctcatggcaaaccgaagaacgggatgtgggaagctcagcttcatttgactgcaaag

SEQ ID NO: 5467 - DNA, 72 bp, Homo sapiens
caccaccaataactggcaccgaacacagggcattacgtaatgcggacaaaaatgcttgtaaatgagttcatg

SEQ ID NO: 5468 - DNA, 72 bp, Homo sapiens
ggctctgcaagtttgctgtgggcggtgaaagtatccgctgacaaaccatccaacgtcggtttggaagcccaa

SEQ ID NO: 5469 - DNA, 72 bp, Homo sapiens
gaggctccagctcttcagccaatctgtggggcaaccgtcccttccactcagagggcagtgacaggagcagac

SEQ ID NO: 5470 - DNA, 72 bp, Homo sapiens
tctgtgccagttgtctaagcagagcgcctcagggacgctggaaatgccttaaggatagaggctgggcatcac

SEQ ID NO: 5471 - DNA, 72 bp, Homo sapiens
gagaaacagactgctcagctgttaagaacacacagcgctccagaaaactggtgttcaacacaacgcgtcact

SEQ ID NO: 5472 - DNA, 72 bp, Homo sapiens
ggcgaggccggcgccttcccgggcaccagggactgcgtggcttggccggaaatcaggctagaagcagctccg

SEQ ID NO: 5473 - DNA, 72 bp, Homo sapiens
acctgcatcctgcccaacatcgaggcggtgagcaacgtgcacaatctcaactcggtcaaggagtccccccat

SEQ ID NO: 5474 - DNA, 72 bp, Homo sapiens
cacagagtcactcagggctcatggtagatgcttagcggtcacagccagtagctgcgcagtgtggcagcagct

SEQ ID NO: 5475 - DNA, 72 bp, Homo sapiens
tggtcaagaatttaagatcataggctgggggttggcgtctgacaaactcacaaatgggctctggtctaggca

SEQ ID NO: 5476 - DNA, 72 bp, Homo sapiens
gtgttcacaatcagaccaccagcaggagtgcggcacgccccttaaacactctaaggaagtatttaccaaggc

SEQ ID NO: 5477 - DNA, 72 bp, Homo sapiens
gatcaacaccaaaccaccccttcttcggacagatacggaaacttaggctgggagaatgaaacaggcaagggc

SEQ ID NO: 5478 - DNA, 72 bp, Homo sapiens
cccaggaggaccataaatcagtaccaggcaaggcccggagcccgtggctgacctttcctggggtcgtcctct

SEQ ID NO: 5479 - DNA, 72 bp, Homo sapiens
gaggggtgctgtggaggggcaacctccagccgtcccgtgtggccaagagctttcagagacagggtgcccctg

SEQ ID NO: 5480 - DNA, 72 bp, Homo sapiens
cttgcaccggcgcacaaggaagtgcgcgtcatccacggaggtgaagccaccattgtcgggcttattcttgat

SEQ ID NO: 5481 - DNA, 72 bp, Homo sapiens
cctgcctgctgtttccacagtcctgagctggttatcgcccgggcctggcccagcacactgaggaaggaacgg

SEQ ID NO: 5482 - DNA, 72 bp, Homo sapiens
agggccccaccaggagctctctttctcctttaaaacgtggtcatcggcactcatctccggtcacatccgtga

SEQ ID NO: 5483 - DNA, 72 bp, Homo sapiens
ggtggccaccagctactcctgaggctaagcagccccggggtgacacagctcctttgtgtgtgtgtgtgtgtg

SEQ ID NO: 5484 - DNA, 72 bp, Homo sapiens
tccagccgggcgcgtcccctcccaccctcgcgccgcggctgtcgccggccccggcccccagtgacgcccagg

SEQ ID NO: 5485 - DNA, 72 bp, Homo sapiens
aatatgggcccacatagctagcctatggccctagtcggcagctcagagcagttcagtgctccctggggtgca

SEQ ID NO: 5486 - DNA, 72 bp, Homo sapiens
accagcaatgactgcaagtaactctaggacactgacgcctatttgatttggaagagaataaggaacataatg

SEQ ID NO: 5487 - DNA, 72 bp, Homo sapiens
ttctcttatgggaagcatattaaatatgactggcgcggctagagctgagactctcctccctccccttccctc

SEQ ID NO: 5488 - DNA, 72 bp, Homo sapiens
gtttgtctgcaggaaccttggaaagtccctaaaaccgtaacataaagacattccactataatcctatgtgat

SEQ ID NO: 5489 - DNA, 72 bp, Homo sapiens
ggctcgcgccaggacatggcgcactccaacccctacgtcaagatctgtctcctgccagaccagaagaactca

SEQ ID NO: 5490 - DNA, 72 bp, Homo sapiens
ctgagggctggagggtgccaagggcagctgctgaccgcctggtgcttcaggagctgggtgctggggaagcca

SEQ ID NO: 5491 - DNA, 72 bp, Homo sapiens
cagcccctcctgagctgccaggaggaggtgctcctcgcagtcagtgtaaataggctgctggaatggccccag

SEQ ID NO: 5492 - DNA, 72 bp, Homo sapiens
acagggagggcggccactgctggactaggtccttgcgtcatttcccccattagggctttcctcgctacagtc

SEQ ID NO: 5493 - DNA, 72 bp, Homo sapiens
tgtggagacggcagtgagaccccggctgccgctatcggggtgcctttggggtagctgccgagcctgccgggc

SEQ ID NO: 5494 - DNA, 72 bp, Homo sapiens
ctccattttacaatgaggaaacggagtcccaaagacgttcagtcatcttcctgatattcacacacttacacc

SEQ ID NO: 5495 - DNA, 72 bp, Homo sapiens
cccagacagggcccagccccctctggggacctccccgctgcccagggctgactcggactcagggcttccggc

SEQ ID NO: 5496 - DNA, 72 bp, Homo sapiens
tatttcctattcaactgtgaatcttcattgttctgcgtcctaaatcaaagaaaagtggctcacctcatgtgg

SEQ ID NO: 5497 - DNA, 72 bp, Homo sapiens
gagggggctaggtgacagcatcgccctttcctctccggctattgcgcaccttctggagcctcgctcagcctg

SEQ ID NO: 5498 - DNA, 72 bp, Homo sapiens
agaaaacacatttacagaggaagcaatccctatctcggcaatgtgctacgactatgaaaaagatgaaaaaaa

SEQ ID NO: 5499 - DNA, 72 bp, Homo sapiens
cagaagcccagagaaggctcaaagctgccagactccgccgagagcctggcctatttcctgttctccccacca

SEQ ID NO: 5500 - DNA, 72 bp, Homo sapiens
agcagtgcaggcctggcctgtgtccccgtgcccagcgggctcccggagcagcattccagagcctcctgcaga

SEQ ID NO: 5501 - DNA, 72 bp, Homo sapiens
gaaagtaggatgccccatggataaagtgtcaactccgtctttatgacaggccaactcagcgggtgcccacca

SEQ ID NO: 5502 - DNA, 72 bp, Homo sapiens
ctagagctcatttctcctgtctagctgtaattttgcgttcattcaccaacctctccttatcctctcctcccc

SEQ ID NO: 5503 - DNA, 72 bp, Homo sapiens
ggccgttcctaatgcccaacccatagatacgatgacggggctttcagtgaaggattcagctcctatttgtct

SEQ ID NO: 5504 - DNA, 72 bp, Homo sapiens
aacttaccagcaaaacggtcagtagccagaaggtccgtcctgaggccgcctctgtcagcctgccagcttttg

SEQ ID NO: 5505 - DNA, 72 bp, Homo sapiens
gcaacccctcctctcctgcacagttgtgacaaccacgaatgtcttcagacattgccaaatcaccctggcgtg

SEQ ID NO: 5506 - DNA, 72 bp, Homo sapiens
acactcctgcaaatgctcagggcttaaaaatctgccggggccaccacattacacactcctatccccgtctac

SEQ ID NO: 5507 - DNA, 72 bp, Homo sapiens
atgtacatattacaattcatcttcaaaaggcaaaacggtttctcatccagttcttgagaagggaaggaaggg

SEQ ID NO: 5508 - DNA, 72 bp, Homo sapiens
ccactgcccgagcctgcgaggtcaccaacagcctccgcaagatttccacacgtgtggctctccactgctcag

SEQ ID NO: 5509 - DNA, 72 bp, Homo sapiens
gatgtttctggaaagttgttcctggtcttggtgatcggttggcaagagcttggctagagagactgatgtaga

SEQ ID NO: 5510 - DNA, 72 bp, Homo sapiens
ccagaggggctgctcacgcctctctgaatctttgccgctaaaccaggtattaattgtcagcacttggggaag

SEQ ID NO: 5511 - DNA, 72 bp, Homo sapiens
gtatcccaaccccatatcccacccctggggcaggacgcgttccccctgcacgcctgtgcccagaggggctcc

SEQ ID NO: 5512 - DNA, 72 bp, Homo sapiens
gtagagctaaaatctttcctgcccgcttcgtggtgcgccagaaggtttctccatgctgtggagacttcctgg

SEQ ID NO: 5513 - DNA, 72 bp, Homo sapiens
gaggagccaaccccagcctcctgccaggatcacctcggcggtcacactccagccaaatagtgttctcggggt

SEQ ID NO: 5514 - DNA, 72 bp, Homo sapiens
cagttcttgttctcaacttcctgacaatctattgacgatctcaggaaaacttgctcttcatcatctcactac

SEQ ID NO: 5515 - DNA, 72 bp, Homo sapiens
gtggatactaaatacaataggtctgtgaccacacacggccccacccccaggggcccaggccccgctgacctt

SEQ ID NO: 5516 - DNA, 72 bp, Homo sapiens
tcctctatcactttcgagaaggaaacaaaggcatgcgtgtaaatgtccaactctctgttctcattctgaaga

SEQ ID NO: 5517 - DNA, 72 bp, Homo sapiens
agcccagggctttatgtccagcctgggaaatgtagcgagaccctatctctattgaaaaaaaaaggggagagg

SEQ ID NO: 5518 - DNA, 72 bp, Homo sapiens
acatgggaatcacggtgctgaccgtgcctctgcagcgctgtcttcaggtgcttttgctgaacggtcatatct

SEQ ID NO: 5519 - DNA, 72 bp, Homo sapiens
ctcgccggctggtagacgcttccaacgccagagaccgcagaattgtaaggtgttccttgttttgaaagctgc

SEQ ID NO: 5520 - DNA, 72 bp, Homo sapiens
actccagatatcctataattaactgcagggcttgacgggggacagagaaactccaccgcatgtttattttta

SEQ ID NO: 5521 - DNA, 72 bp, Homo sapiens
ccaccctgtcaggaaatgcctggggcccaggatcccgagctgtgggcttggtgacgctggcctgaccagcct

SEQ ID NO: 5522 - DNA, 72 bp, Homo sapiens
tccttttattccattccactcctttcattgctttgcgctaaatgaaatttggattgcaacaacaacttttta

SEQ ID NO: 5523 - DNA, 72 bp, Homo sapiens
acgggatgagaacagcacctgcctcacagagtccgcgtgaacatcaaaggtgcaggatgtttgggggctccg

SEQ ID NO: 5524 - DNA, 72 bp, Homo sapiens
atcactccggcctgtacatgataaactaaaaagttcgtaaaacagcagtgctgtttttcaaaactgacattt

SEQ ID NO: 5525 - DNA, 72 bp, Homo sapiens
tgatttggtaccttatgcatagactgtaaaactaacggagatctgctcagcttacatgttgcaacaggtgtt

SEQ ID NO: 5526 - DNA, 72 bp, Homo sapiens
ctctctctttttctgttgaagcctttgtattttttcgtctctattgaagacttccttgacttcctctcttct

SEQ ID NO: 5527 - DNA, 72 bp, Homo sapiens
gtgcagccggcggtgcaccaatagccccaggttggcgttggagggcgcactggcgccacccccggggaagac

SEQ ID NO: 5528 - DNA, 72 bp, Homo sapiens
tgtccctcaagccaagtgatttccttcaccctcggcgtccccatgaaaccatgttcacacaagtgtaataca

SEQ ID NO: 5529 - DNA, 72 bp, Homo sapiens
aaagagcctctaggcctgagcctggatgcaccctccgccctctggccccgtagtgtgtgtctgagacagagt

SEQ ID NO: 5530 - DNA, 72 bp, Homo sapiens
cacctcggcctcccagagtgctggggtaacaggcacgagccacgacgtccagccttggacatacattttgaa

SEQ ID NO: 5531 - DNA, 72 bp, Homo sapiens
atgagagctgccaccatgagtaatatcccagccctcggttctgcttccctttctgagtcccacaaaagccac

SEQ ID NO: 5532 - DNA, 72 bp, Homo sapiens
cctaggtagtaaccttctgcacatatgtatagctccgaatttcctcactgttcgtctggtgcaaaaacaata

SEQ ID NO: 5533 - DNA, 72 bp, Homo sapiens
ttctcaagacggaaaaaccgagccccagaaaatggcgataagatggggatgcaggaaaaagctagctaatga

SEQ ID NO: 5534 - DNA, 72 bp, Homo sapiens
tccgcgcaccgcgatcttcctgtcccgcgagtccccgacgcccgagtccgttctgcgcctacacaggtaggt

SEQ ID NO: 5535 - DNA, 72 bp, Homo sapiens
ggttctttaagaaccagccctggtccagcccattccgcaggccagcaagcttctgaaaagcaaacctaggaa

SEQ ID NO: 5536 - DNA, 72 bp, Homo sapiens
aggagacagagccgtgagggcctctggctgcaactcgcgagggtcggctttccctgggtctccgccctacgg

SEQ ID NO: 5537 - DNA, 72 bp, Homo sapiens
gacatctgcgtcagagataggaggtctcaatgccacgggcaggggcaactcggactgtggggcgtggaaagg

SEQ ID NO: 5538 - DNA, 72 bp, Homo sapiens
ctagtgtcccctgggcttgagaagaggtggtgaaccgtctgcagggccagaccttggagcacgcctccactg

SEQ ID NO: 5539 - DNA, 72 bp, Homo sapiens
ctcctgtttacactgggaacctcactgaaagtctccgattcagggaagtgctcttactcagccctttgtacc

SEQ ID NO: 5540 - DNA, 72 bp, Homo sapiens
ttttcctgtgttgattttttttgcttgttgatttccgtcacttctctggtcttctaaagttctaagaaagaa

SEQ ID NO: 5541 - DNA, 72 bp, Homo sapiens
ggagtagaagcactaaaggaggtagaggcaacacgcggtgttcttgaagagtttccagacagatgtattaaa

SEQ ID NO: 5542 - DNA, 72 bp, Homo sapiens
tccggacagtattaattagctcaagtccagggctacgggactaaaagcagctgtgcaccccccacccctttt

SEQ ID NO: 5543 - DNA, 72 bp, Homo sapiens
ggcgaggctgtgaggacgggttttggagcgccgctcggccgtcctcaaaactttggacacaccctccgtttc

SEQ ID NO: 5544 - DNA, 72 bp, Homo sapiens
aagctactgatttcctgtcacctgatgtctatcagcgatttcatcttcaggcctggactacaccactcaccc

SEQ ID NO: 5545 - DNA, 72 bp, Homo sapiens
acacacacacgcgcacacacacacacacacacacacggacaggcacccccttggtggccttcacagtttcac

SEQ ID NO: 5546 - DNA, 72 bp, Homo sapiens
ttataggtccccagtcatgggatctggaaacagagcggaggaaggagctcgggaatggtcttgctcaatcct

SEQ ID NO: 5547 - DNA, 72 bp, Homo sapiens
caaaggtccgggcgggccattcgggatgtcgtaggcggccctgggatgtgaggggcctgcgggatctgtccc

SEQ ID NO: 5548 - DNA, 72 bp, Homo sapiens
cacactcatctccctgcccctttgaggttcccgaccgaggcaaggggtcttgtgcaagtcaggtttgtagat

SEQ ID NO: 5549 - DNA, 72 bp, Homo sapiens
aggctccggtgtagcccaccgggcagtggcacaggcggtggccctccacctctaggcagcgacccccatgga

SEQ ID NO: 5550 - DNA, 72 bp, Homo sapiens
agcttcttagagtccttgtcgtcacgaacaccgcacggtcctgcaagcttcttagagtccttgtcgtcacga

SEQ ID NO: 5551 - DNA, 72 bp, Homo sapiens
gatcccacctggtatcagtaagggaaccatggcgacggccagccttgcccatgtgaggcatttgctttgtca

SEQ ID NO: 5552 - DNA, 72 bp, Homo sapiens
gtccacacctgctgcattcagtgccagcctcagctcgtaggagttcatggttccagaggtgtcctcatcgaa

SEQ ID NO: 5553 - DNA, 72 bp, Homo sapiens
caaatttgtagagctttataactgagtatcttcctcgtcagactgcatttcaagaagctaggtcccaagtct

SEQ ID NO: 5554 - DNA, 72 bp, Homo sapiens
ggtctgtgcagtgctggatgaatcatcaggggactcgtggctgcctgattccaattccttcggcatcctcca

SEQ ID NO: 5555 - DNA, 72 bp, Homo sapiens
ttgtgccaggggttctctggaggcccaagtcaccccggagacacagggacaccccacagccacgaccgtccc

SEQ ID NO: 5556 - DNA, 72 bp, Homo sapiens
cagtcctcaaagaccagtttcagtccactgactggcggaaactagttgccaagcattgagaagtgagtgggt

SEQ ID NO: 5557 - DNA, 72 bp, Homo sapiens
ctccaggcttcctttggttttgatttacggccccacggaactggagcgaggccctgcagcaggcttatctct

SEQ ID NO: 5558 - DNA, 72 bp, Homo sapiens
cttcccccgtcaatatttactccgaagtggggatgcgccagcggcctattgttctcttccgggaagggaggg

SEQ ID NO: 5559 - DNA, 72 bp, Homo sapiens
tgtgtcagaagtctgagtgacgcaaggccatgagccgaggaatgcagacaccctctagaaactggaaaaggc

SEQ ID NO: 5560 - DNA, 72 bp, Homo sapiens
cttgctgtggcttcctggcctggctcagcattggccgtccggctcctgcagcagtgacatctccactctgga

SEQ ID NO: 5561 - DNA, 72 bp, Homo sapiens
atgaccgagtggccttcccccgggaagaccagtgtcgtaactggaattaagttgtggaacataagagtcaag

SEQ ID NO: 5562 - DNA, 72 bp, Homo sapiens
tccctgcagttcctgccaggccttgccagccggggcgagggttgggatgatcctggcggcctatgcctgtgt

SEQ ID NO: 5563 - DNA, 72 bp, Homo sapiens
tcaatgtcggctcctcttcttgtcccaggggcttgcgacgccccggggaggccgcttctcgtccagcaggcg

SEQ ID NO: 5564 - DNA, 72 bp, Homo sapiens
gcatcatctgtgacgctgctcggctcctgaggccacgtgtgaattggcgcggttctccccagctgcccacag

SEQ ID NO: 5565 - DNA, 72 bp, Homo sapiens
attaattacagccatgttaaaaggggtgtttgggacggtttggtagttccttttgaagaaaacctgtgtctt

SEQ ID NO: 5566 - DNA, 72 bp, Homo sapiens
atcatccccagttgagaactttctgttctaccttccgctgtcagaaaatttgaattttgttgctgctgctta

SEQ ID NO: 5567 - DNA, 72 bp, Homo sapiens
ggggttaggagtcatggttccagcgtgggctccaccgccaacttgctcccaaaccccagtttcctcaatggt

SEQ ID NO: 5568 - DNA, 72 bp, Homo sapiens
aacactaagaatgcagccacaggctgtggtcacaacgcagtgagctggccagttgggtgacatcagcttgtc

SEQ ID NO: 5569 - DNA, 72 bp, Homo sapiens
ccagacactctgatgttggaagacaaagcatatttcgtaagtggcatgatttctgtgctcaagtttagaaca

SEQ ID NO: 5570 - DNA, 72 bp, Homo sapiens
tggctccacccataaagttcccactgattatcacacggcatcctcattctccagtctcacctactctgtctt

SEQ ID NO: 5571 - DNA, 72 bp, Homo sapiens
acaaagagtgatgatattttgtttggatctgagttcgtgtgttattactttgtgtgaagctagataggagta

SEQ ID NO: 5572 - DNA, 72 bp, Homo sapiens
aggaacatgtcacaatcagctaaggctgaggataacgatgggagcaaggtcccttgtagatgacgaggggca

SEQ ID NO: 5573 - DNA, 72 bp, Homo sapiens
gaatcccgatcatacatactgcttgcatgcactgacgagttgattttgaggaattttaccacgcactaacca

SEQ ID NO: 5574 - DNA, 72 bp, Homo sapiens
aggctgtgtctccatctcagaaacctatttaaagccgaactttataatggaaacacagccacaacctgctat

SEQ ID NO: 5575 - DNA, 72 bp, Homo sapiens
actaatggtttattacacacctgccacctctcatccggcaggcgggcgggcgctgtctcccgggcccagctg

SEQ ID NO: 5576 - DNA, 72 bp, Homo sapiens
ctgacccgattcggggcttctctagccccatcccccgcccacctgcaaccccagctgacgccctgaggctga

SEQ ID NO: 5577 - DNA, 72 bp, Homo sapiens
caagccatgacctatagaaaagagtttaggatgcacgtacaggcctgagacttgaacttgcttctaataatg

SEQ ID NO: 5578 - DNA, 72 bp, Homo sapiens
acagtgctggctgtgtggggtgtggggggtgggtgcgtgtgcatcagagactaagcaaggatggaaacaggc

SEQ ID NO: 5579 - DNA, 72 bp, Homo sapiens
cctagaaatacttttgcaatgaaatgttttgcagtcgttatgggcttgtttcttaggaactgagtgacttgg

SEQ ID NO: 5580 - DNA, 72 bp, Homo sapiens
atccttgccttctccttcatcgtcatcatcagtgacgtttactgagtatcccctataccccatgcagttttc

SEQ ID NO: 5581 - DNA, 72 bp, Homo sapiens
cttagcccctgtaaaggaggaagtccctttgtcaacggacatgagaatgctgtttggccaatgaccatagtc

SEQ ID NO: 5582 - DNA, 72 bp, Homo sapiens
ggcaggaagccctgcggtttctggcttctcccaggcggcctccggatctggcccccgccccccggccaacag

SEQ ID NO: 5583 - DNA, 72 bp, Homo sapiens
tcatgagaagctgaaatagattattgtgtaataaccgaatggaacatctgtttaaccagatgttttagttga

SEQ ID NO: 5584 - DNA, 72 bp, Homo sapiens
gccaccacagagctcccctcagctcacgggaccatcggcctcccaccacccctcagcagaggcaggtcccgg

SEQ ID NO: 5585 - DNA, 72 bp, Homo sapiens
tttgtgtgtcccagttacctaggttctgtagcagacgtggcatcagagaccacgtggccccaacccctcagg

SEQ ID NO: 5586 - DNA, 72 bp, Homo sapiens
acttttcagcttgtcttatgtgggtttgttcaccccgtccggtttcatttttatttaaaacaattggtatct

SEQ ID NO: 5587 - DNA, 72 bp, Homo sapiens
attgaaagtagtgtggtttgtttttattgtggaaccgatcaggaagaacaatttacagtcattgccattctt

SEQ ID NO: 5588 - DNA, 72 bp, Homo sapiens
ttctctgaaaccttctcctcctcctctcagagtcacgggaggaactccaccagactccaaaggggcagccca

SEQ ID NO: 5589 - DNA, 72 bp, Homo sapiens
aaggtcatgttgggccatgtacatggttggtgacccggccctaggtcttctggctcaaattcctgtcccctt

SEQ ID NO: 5590 - DNA, 72 bp, Homo sapiens
agaagaaaaagaatgaaattgggtaactgtcattgcgttagctttatgttgaattgggaaattgtggcataa

SEQ ID NO: 5591 - DNA, 72 bp, Homo sapiens
aatcattcttgatgccctgcaaataccaggcgctgcgctaggccctgcagatgcgacaacgaacgtagatgc

SEQ ID NO: 5592 - DNA, 72 bp, Homo sapiens
ggcggtgcgctggtagaggcaccgcacacaggcatcgtttcacacaactgttacttaggttttccaatagta

SEQ ID NO: 5593 - DNA, 72 bp, Homo sapiens
ctccatttctgatcaccatagagataaccaaattacgtttctcaaactctgtcatgctgagggctgcagtga

SEQ ID NO: 5594 - DNA, 72 bp, Homo sapiens
tggatcaagacaaaaacaagactccttcgtaatcacgtgggaatgctgaaaaaacgtaaacattgtccaaac

SEQ ID NO: 5595 - DNA, 72 bp, Homo sapiens
tattatgcaagaacccaaaccagaaaaggaggttccggggttttcttgaaataggctgctttattcctaaca

SEQ ID NO: 5596 - DNA, 72 bp, Homo sapiens
tctcagagccctgtcccctcctgtgtagggcgggacgtcagaggggagcctgcagacccagtctcatgtctt

SEQ ID NO: 5597 - DNA, 72 bp, Homo sapiens
ggcaaggccaaggcaggagtgggggcggggcccagcgcgtgggcacacgtgcggcccagagcgtgggcacac

SEQ ID NO: 5598 - DNA, 72 bp, Homo sapiens
agcaaccatagtcataggcttcctaattttgaccacgggaaaagaggagaggcctctgcgtgtttgtgtctg

SEQ ID NO: 5599 - DNA, 72 bp, Homo sapiens
acttaggaaagaccagtcaggtggtactctttactcgtaagattacacatttgaaggcagggaacccattat

SEQ ID NO: 5600 - DNA, 72 bp, Homo sapiens
gcggctcctggaggcctgtgctcagggtctcaactcgtggtcaagcttatatcctagaatattacacattaa

SEQ ID NO: 5601 - DNA, 72 bp, Homo sapiens
gagaaaataaacctcagtggcttggtaatgtcacacggatggtaaatgccgcgcctagattcaaggccagag

SEQ ID NO: 5602 - DNA, 72 bp, Homo sapiens
ttgagctctgtactctgacatttcaagctttatgccgccctagcttgagcatagttgggaaagagcatcata

SEQ ID NO: 5603 - DNA, 72 bp, Homo sapiens
tgtctttaattaaaaaaaagcagcggcagctcagtcgccccaagggacttgcccaagatggcccagctagta

SEQ ID NO: 5604 - DNA, 72 bp, Homo sapiens
actagactggtatagtagtgaacatctgtagtccccgctactagggaggctaaggctggtggatcacttgag

SEQ ID NO: 5605 - DNA, 72 bp, Homo sapiens
ctggtcagcctggccaataagcatttcccatccatcgccccagcactaggacagctgagagaatttggttca

SEQ ID NO: 5606 - DNA, 72 bp, Homo sapiens
ccttggaagaggccaggcagacagcacagcgttatcgaggaacttcttacttagcacgaaggggcaaaagcg

SEQ ID NO: 5607 - DNA, 72 bp, Homo sapiens
ttaaagctttacaccttgggaccagtgtaccttctcgtgcagaatacatttagatataaaaagacgttatta

SEQ ID NO: 5608 - DNA, 72 bp, Homo sapiens
gaaggagttttctcaagatcgcccaaggttcctggcgccgttattcatggaggacagaatcccccacccagc

SEQ ID NO: 5609 - DNA, 72 bp, Homo sapiens
tatctggagacaccctaaaacaccaagcttgcttgcgttggaagtcttccagaactggttacccatatttta

SEQ ID NO: 5610 - DNA, 72 bp, Homo sapiens
atgcagacagcactcttcctctgcttccaagctcccgtcggtcctgggctggcctgggcaacacagcctcat

SEQ ID NO: 5611 - DNA, 72 bp, Homo sapiens
gaactaagagctccagctctgaccatgtgtgagtgcgtatgtgactcaggagagccctgccccaggccaggc

SEQ ID NO: 5612 - DNA, 72 bp, Homo sapiens
gtgccaccatccctctcccagctgggccctgggcacgtccccgtgccgtcagccagtgcgctcttggagcag

SEQ ID NO: 5613 - DNA, 72 bp, Homo sapiens
attcataggataataaaaaactgccctgaagcaaacgtgaggaagaagaaatagtggtagccagaatcttgg

SEQ ID NO: 5614 - DNA, 72 bp, Homo sapiens
ataacttcaccgcctcttacctgctccagctgcaacgcgtgagagtgctgaactgtggcctagatttttctc

SEQ ID NO: 5615 - DNA, 72 bp, Homo sapiens
ccagggtggagttctcactgctgcctggccacggacgccccttcatcctcaggagccaggcaggccccacca

SEQ ID NO: 5616 - DNA, 72 bp, Homo sapiens
cccacacggtagtcgatctgctctcctccggaagacggtcacctttcggggacctgaaaattttttttcagg

SEQ ID NO: 5617 - DNA, 72 bp, Homo sapiens
agaaaaaaagaaattccacctgtgtccttgtgtcacgtggcacacagcataagattttagtcttgctcatac

SEQ ID NO: 5618 - DNA, 72 bp, Homo sapiens
tgtatatcaagtacagagcagggggcctagtattccgtaggcactcagtaaatgtgggttcagactcgaggc

SEQ ID NO: 5619 - DNA, 72 bp, Homo sapiens
cccgcaggaagtgtttctcaagagaagcttgcatacggtaaatatattatgtggaagaggggggtgggtggg

SEQ ID NO: 5620 - DNA, 72 bp, Homo sapiens
ctccagggaagaggaagcaagtgacattcctggcccgctcttacgccacgagctctgcagacgccgaaaggt

SEQ ID NO: 5621 - DNA, 72 bp, Homo sapiens
gctgtttttttttctcaaagtttgatgagattcgccgtagaattccttctcacatagtcttgggcaagattt

SEQ ID NO: 5622 - DNA, 72 bp, Homo sapiens
gggctggagtcagttaggtaacaggccacgggccccgggctcaggccactgcacggacccagggaacgggct

SEQ ID NO: 5623 - DNA, 72 bp, Homo sapiens
tgtctccaaatatccctgaacaggatcagagggaccggttctctgctcttgcccaatccagacctgtgaccc

SEQ ID NO: 5624 - DNA, 72 bp, Homo sapiens
gctgtgagctgacaaggccactgagaaagccccagcgcctggagctggtctgacagttcccacaagccaaac

SEQ ID NO: 5625 - DNA, 72 bp, Homo sapiens
tgctcctgcctgctttgtccagctcatttgttgaccgactccaggcttccaggcttggctgtgtgggtcctg

SEQ ID NO: 5626 - DNA, 72 bp, Homo sapiens
tcttcctgacttgtagacagctgcctttttgttcacgtggccttgtttgtttgtttgtttggtgcatgcatg

SEQ ID NO: 5627 - DNA, 72 bp, Homo sapiens
ttgtaaaattttatattagtttttaatgtcagtggcgactcggttcctggggctgcagccagcctgggactt

SEQ ID NO: 5628 - DNA, 72 bp, Homo sapiens
ccaccaacctcaacagctggaagcaccagagcatgcgattctcaaggctttgggttttacccatgggtcaag

SEQ ID NO: 5629 - DNA, 72 bp, Homo sapiens
aaggctgaaacatcagcagacaacctctgctgggccgtcttcaggggagggggaggggggctggtcagccca

SEQ ID NO: 5630 - DNA, 72 bp, Homo sapiens
gtaggggtcagaggtcacgcttaccaagggtttaccgtgtcaggcacgggtctgtgttacctcatcacgtcc

SEQ ID NO: 5631 - DNA, 72 bp, Homo sapiens
cgtgatgagctggcaggcagaggcagacagagcgccgagggcgagccttctgaatgggtaaggcaaagagag

SEQ ID NO: 5632 - DNA, 72 bp, Homo sapiens
agattcacagtctgtctattaatgaaatgcctccccgtctctttcccttggtccatttggcctggacggtca

SEQ ID NO: 5633 - DNA, 72 bp, Homo sapiens
ggccgggaatgacagcaatgatggagtcggggaggcggcccaggccatgccaggaccggagccctgggggcc

SEQ ID NO: 5634 - DNA, 72 bp, Homo sapiens
accgtacgtcagcattaagaaatcaggaaacgggccgggcgcggtggctcacgcctgtaatctcagcacttt

SEQ ID NO: 5635 - DNA, 72 bp, Homo sapiens
ccagcttctggtgactataagcattcctcggcttgcggttacatcactccaatctccgcctccatgagcaca

SEQ ID NO: 5636 - DNA, 72 bp, Homo sapiens
catatgttttacagtgtcctaaccgctttggagagcgataacttgagttaaagcacctgtctgtgcctggcc

SEQ ID NO: 5637 - DNA, 72 bp, Homo sapiens
ggaagagggctattggttgattcttgaaaggggagcgcatttcctgttggcctgcgaatttggggtgaactg

SEQ ID NO: 5638 - DNA, 72 bp, Homo sapiens
tgacagaagcagcgtggtttccttccttgtcaagccgctatagcaccagcttcccaatcctacaggctgcta

SEQ ID NO: 5639 - DNA, 72 bp, Homo sapiens
taccattaaggaacaggaaccatgcatgacttactcgtgactataatcttagctaggtagaggttctctaaa

SEQ ID NO: 5640 - DNA, 72 bp, Homo sapiens
ctcccgcacgctgctgagcacaggtgaagcgtgggcgggctccccttgccaggtcctccgtcggccgggccg

SEQ ID NO: 5641 - DNA, 72 bp, Homo sapiens
tcagaagtgcagaccagggttctcagcacagtgcccgtcgtgcttccatggcttgctacggagagagacctc

SEQ ID NO: 5642 - DNA, 72 bp, Homo sapiens
tcctgtctcatttccccattagtccaggagattcacgggtgcccaggctgccccctcctgcctccagactcc

SEQ ID NO: 5643 - DNA, 72 bp, Homo sapiens
caccaacccctttcaatgacaagccccacagtagacgaggacgtttttggttgcgcaagcggcttctgaagt

SEQ ID NO: 5644 - DNA, 72 bp, Homo sapiens
gtagcgtttaggcttagaagttactaatttggagccgtgagtatatgtgtataagctagtaacacgtgatgg

SEQ ID NO: 5645 - DNA, 72 bp, Homo sapiens
tcatccaaattgcagaacggcggggcagcatcaggcggttggtttatatcagtggaggagtctttagaacgg

SEQ ID NO: 5646 - DNA, 72 bp, Homo sapiens
tcactgcttggacttaaccctaactatgatttttacgaaggtttcccccaagcccggaaggaaaggaaggag

SEQ ID NO: 5647 - DNA, 72 bp, Homo sapiens
attacacaaagttgaaccagatggggctggttctgcgcttacataactggtccaactgtttctgtacctcgc

SEQ ID NO: 5648 - DNA, 72 bp, Homo sapiens
cccatgctgcttgggtatgcttcgacccaacctcacgggttaaaatcatgatggtgaggtattacagggccc

SEQ ID NO: 5649 - DNA, 72 bp, Homo sapiens
cagcggagagaacggcctgcgtgggggctggtgggcggagcgggtggatcttggcaaacggcaggaatggaa

SEQ ID NO: 5650 - DNA, 72 bp, Homo sapiens
ctggaactccctagcactatatttttaccttgacacgaaatgaaattatgacatcatcatgggaacacagga

SEQ ID NO: 5651 - DNA, 72 bp, Homo sapiens
gcaaaggtcgaagaccaggagctgccaacccagcccgaggccccagacgagcaccaggacatggacgcagac

SEQ ID NO: 5652 - DNA, 72 bp, Homo sapiens
gtgaggtttggaaacccacctctttgacctaggcccggtcaacaccgataaaccctctgaatcaacgctggc

SEQ ID NO: 5653 - DNA, 72 bp, Homo sapiens
aagctcagaggtgatgtgcttagatgtcacagagccgggaggggaacaggctgggctgcagagaggaggcca

SEQ ID NO: 5654 - DNA, 72 bp, Homo sapiens
aagccctgtttgctccactgaccaggagaaaaatgcggaaaaggggtgaaagggtgacatcacccaggattg

SEQ ID NO: 5655 - DNA, 72 bp, Homo sapiens
ctgcacttcctacagtcaaaatactctgaagaagacggagattctaaggtccaagccttagggcaggagctc

SEQ ID NO: 5656 - DNA, 72 bp, Homo sapiens
tcttatctctgtagaactatgtcacagggaacttacgactttttccttagagggaccagtaaggctgtgctt

SEQ ID NO: 5657 - DNA, 72 bp, Homo sapiens
ttctgtgttcacaaccgttcagggcacaagttcttcggtctaaccgaatctttccctgctgcggggttaagc

SEQ ID NO: 5658 - DNA, 72 bp, Homo sapiens
gatcaggagtttccctcatcaacctgctgactttgcgtggtggtttcattacaagttgtgagccccttattg

SEQ ID NO: 5659 - DNA, 72 bp, Homo sapiens
tgctgagattacaagcgtgagccaccgtgcctggccgtcagtaagtgaattttttattgggaaaaagaacct

SEQ ID NO: 5660 - DNA, 72 bp, Homo sapiens
ttctctttacctttcaagtatgttaatattgactacgtcatcctttaggattcttttacacacacagtacag

SEQ ID NO: 5661 - DNA, 72 bp, Homo sapiens
ataatttttagtaaaattctgagtcattcttgacccgtattacaaccaaggataaatatttagtatggaaaa

SEQ ID NO: 5662 - DNA, 72 bp, Homo sapiens
ctccctgtacggcaacagaactcctggaacttgtccgcagagaatgagcagggcccttgcttttttatggtc

SEQ ID NO: 5663 - DNA, 72 bp, Homo sapiens
cagggacgtaaacccaacccacagcttcggattctcggttcaatactttatgcagctaaataatgtgaaaat

SEQ ID NO: 5664 - DNA, 72 bp, Homo sapiens
aaacacaggaagctgggagagccacgctcagaaaccgggcctctgccagggaggctgttcacccagagaagc

SEQ ID NO: 5665 - DNA, 72 bp, Homo sapiens
tcaggaaacttacaatcatggcagaagggcaggtccgacttccatggtggccgcacagagagtgggaacatg

SEQ ID NO: 5666 - DNA, 72 bp, Homo sapiens
tcacggagctagcaaatctcgaggagcgggggagacgagggttggagacacatcagtgagacgagctaaaaa

SEQ ID NO: 5667 - DNA, 72 bp, Homo sapiens
gatcctgcagcagacagaagcggaggggtgaggcacgggagccagatggcccgaggccccagggactggcct

SEQ ID NO: 5668 - DNA, 72 bp, Homo sapiens
tttcctgtcttttcatttgcctgcttttaataaaccgagtgacagatatatcaatgctagtgttatctgtgc

SEQ ID NO: 5669 - DNA, 72 bp, Homo sapiens
caggcattgcaagaaaccacagctgaattccttggcgctcatttttataaatattccacaggaaggatgtca

SEQ ID NO: 5670 - DNA, 72 bp, Homo sapiens
aggcgtgggccgtggtgagcctctccctgccctcccgctggaatagaaagctgatcccgacgtcccactccg

SEQ ID NO: 5671 - DNA, 72 bp, Homo sapiens
gctggccagccccacagcccacgtcctgtcagtgccgccgcctcgcccaccgcatgccccctcgtgccagtc

SEQ ID NO: 5672 - DNA, 72 bp, Homo sapiens
cctggaggacagggagagcggccgccccgcccctgcggagcacaggacgcttcctgccacccctgcagagca

SEQ ID NO: 5673 - DNA, 72 bp, Homo sapiens
ttctctgctgggagctctgcatgccctgcacctggcgccttgtagcctgctccacctcagcagacaggttcc

SEQ ID NO: 5674 - DNA, 72 bp, Homo sapiens
aggtggcctggttctgctctgcactccctgcctatcgttggaacattgtccaacaaaattgacacatccagg

SEQ ID NO: 5675 - DNA, 72 bp, Homo sapiens
ccgctgcatctcccagagcagaattggtaagagtgcgtccattcaccaggcgtagacgctgcattcgaggag

SEQ ID NO: 5676 - DNA, 72 bp, Homo sapiens
cggacaggtcgctatggcaaccgggtggctggtcccgcaccgtggtggtagcagacggggaagagatgagct

SEQ ID NO: 5677 - DNA, 72 bp, Homo sapiens
cactgcccccagcctctgtccaacacaggaggaatcgaggtagcaaacggctgaaatgctctgactaggggt

SEQ ID NO: 5678 - DNA, 72 bp, Homo sapiens
ccctgccctgcctgtagggctcggggacctccagccggctggagccgagagaacgcatggagcccacctatc

SEQ ID NO: 5679 - DNA, 72 bp, Homo sapiens
tcctaaggctgcatagttctccactgtgtgtgcaccgcactttctctatccactcatccatcggtgcgcgct

SEQ ID NO: 5680 - DNA, 72 bp, Homo sapiens
aagaaagtggcccatctgtcgccagttagagactccgcggacctgtttttacccgcaggagagattaaccct

SEQ ID NO: 5681 - DNA, 72 bp, Homo sapiens
tatcatagggaagatgtagaaatagcttggtaatacgagcttgccaaaaaaattgatacagagccagtaatt

SEQ ID NO: 5682 - DNA, 72 bp, Homo sapiens
aaatattcgctgtgattaccatcagtccattttaccgaggaaggagccaaggtccaggcccactgaaggact

SEQ ID NO: 5683 - DNA, 72 bp, Homo sapiens
ccttttactttatgggttcctagaaaaccactcatcgtcattattaacattcattagatgtttctcttaaat

SEQ ID NO: 5684 - DNA, 72 bp, Homo sapiens
ccaataaaacagccaggagacaaggcgagaagcctcggctcccagccgccggatgggattcaggcgtggttc

SEQ ID NO: 5685 - DNA, 72 bp, Homo sapiens
caatcgagtgcaagatgctaagctggggtagatgccggtaatagcgtgggccttgccctgggagctcacggc

SEQ ID NO: 5686 - DNA, 72 bp, Homo sapiens
caaggtgtcagtccagtctcagcacttccgggacacgttagagcgtcgtttgaacctaatcttagggcttgt

SEQ ID NO: 5687 - DNA, 72 bp, Homo sapiens
ggcagtgagggtggctcacacacctctaatctcagcgcttgggagtccagggccagaggatcccttgaggcc

SEQ ID NO: 5688 - DNA, 72 bp, Homo sapiens
tcaattctcatcttgtttcgcagcattttgtgtatcgccaccacgtctgtaaccggagcgcctagtacagta

SEQ ID NO: 5689 - DNA, 72 bp, Homo sapiens
caactggtgagcgcgcaccgtagttctctgtcggccggccctgggtccatcttccagtacagtgttggatgg

SEQ ID NO: 5690 - DNA, 72 bp, Homo sapiens
tggagttattgtgcttccctctttttccctagtgccgctttcttagcacttagcactgtccagaacacactt

SEQ ID NO: 5691 - DNA, 72 bp, Homo sapiens
taggctgagtactatggggttacagtcttccccaacgttgcctaagtttcattatccccttataaggttaca

SEQ ID NO: 5692 - DNA, 72 bp, Homo sapiens
gcacggggcacataaggcagcacattagagaaagccggcccctggatccgtctttcgcgtttattttaagcc

SEQ ID NO: 5693 - DNA, 72 bp, Homo sapiens
gcagagaactgctgaacagagtgagactcagaggacgtggttgagcatggctgcgaccctgcagttcctggt

SEQ ID NO: 5694 - DNA, 72 bp, Homo sapiens
gcagccgggctgtgctgcctgggcccaggcttctgcgaggtggtttacaggcgggaaccattgctcccacaa

SEQ ID NO: 5695 - DNA, 72 bp, Homo sapiens
acagtgcaggccacaaaaactaccagggctctgaacgctagaaatccccacagggctcaaagaggggcagga

SEQ ID NO: 5696 - DNA, 72 bp, Homo sapiens
gactgcggctgtgctttccccgaggccctgggatccgcctttgtggtggtaacaggactccccttctctaga

SEQ ID NO: 5697 - DNA, 72 bp, Homo sapiens
tgacgcaactcgtgaacagccgtgcctgccttgggcgcagcctccggcgccagagctgggctcttcaacacg

SEQ ID NO: 5698 - DNA, 72 bp, Homo sapiens
gaacacaatgccgaaggggaaatacctgggggcggcggggcagccaggctcaggaaccaggcaggcagacac

SEQ ID NO: 5699 - DNA, 72 bp, Homo sapiens
aacagtcagtaatctcagttagcaagtgtttggcacgcctgttttaacctgcacaggttcagttcacacaaa

SEQ ID NO: 5700 - DNA, 72 bp, Homo sapiens
gtgctgtgtttgcaggcaccatgggtctccctggacggggttcggttccaccccagcgcccttgtcttgttt

SEQ ID NO: 5701 - DNA, 72 bp, Homo sapiens
gacacaatttcaatttggcttgtggaaactggatacgagtaagtttccttaaaattcgagtagaaagcagct

SEQ ID NO: 5702 - DNA, 72 bp, Homo sapiens
caagtcctgtgacatcattgctcccctctctgacccgtcttcatcccaggaaggaccttcatgttaccctcc

SEQ ID NO: 5703 - DNA, 72 bp, Homo sapiens
gtgatgctggagtatgagcagtggtttcctaaaggcgcaaactggagggtcggcagctcccctcagcctacc

SEQ ID NO: 5704 - DNA, 72 bp, Homo sapiens
gattcagtctccttgacaaatatactgcattgtaccggatgagtcatccgagggttagtccgcattttatag

SEQ ID NO: 5705 - DNA, 72 bp, Homo sapiens
tgcattgatcccagcgtcttcatcaggaggatgggcggagcacccaccgcagagggttattgagaaagttaa

SEQ ID NO: 5706 - DNA, 72 bp, Homo sapiens
agtggtgaccgcgagccgcttatgtggaaccaccgcgtcctgaccttggaggtgcgagtctgggaaaggcgc

SEQ ID NO: 5707 - DNA, 72 bp, Homo sapiens
ggaaacctggcgaaatcctgtctctacaaaaattacgaaaattagccaggcatggtggtgactgtcccagct

SEQ ID NO: 5708 - DNA, 72 bp, Homo sapiens
atatcctgtcatttcgtctgtatttcagtttgtatcgctaagagataaggacccttttatagacataaccac

SEQ ID NO: 5709 - DNA, 72 bp, Homo sapiens
atttgtgggcccagagtaaagagctcattctgttacagacactgaatagccttgtttttgtcagtagtcagc

SEQ ID NO: 5710 - DNA, 72 bp, Homo sapiens
ggagctgcccgcaccctccttctcctcctcgaggccggtgcagcgttctgcaggttgccctgcagttcccac

SEQ ID NO: 5711 - DNA, 72 bp, Homo sapiens
tgtatgtattgtccataacactctacctgacaaaacgcccacctgatggaactgacaaatgagttaatgtat

SEQ ID NO: 5712 - DNA, 72 bp, Homo sapiens
caggacgaagatcggggagagccgagttccagggtcgccagcagaggaccctcgcgcccgtccggccggacc

SEQ ID NO: 5713 - DNA, 72 bp, Homo sapiens
atgttacagataagaaaacaggcataggctgggcacggtggttcacgcctgtaatcccagcaatttgggagg

SEQ ID NO: 5714 - DNA, 72 bp, Homo sapiens
tgccatcattgctctctggcctggatgacagagtacgtccctgactcaaaaaaaaaaaaaaggagaaaaaaa

SEQ ID NO: 5715 - DNA, 72 bp, Homo sapiens
aggggggccccaattgtaagccaaatttactgttacggcgatcaccgtctcaaattttctgccctttaaaga

SEQ ID NO: 5716 - DNA, 72 bp, Homo sapiens
gtctcctttctgtagggtctccattcccatggcgtcgttttctaggaagattttatcctcttgcttttctgt

SEQ ID NO: 5717 - DNA, 72 bp, Homo sapiens
acgagaagagctttccagacttagagaagagcaaacgcctcctggcaggcggaagcacactgaggaagcatg

SEQ ID NO: 5718 - DNA, 72 bp, Homo sapiens
ggggcacagtcctggcctcagtccagccttccagacgtggcccccgggtccaggccagagcacaaggggctg

SEQ ID NO: 5719 - DNA, 72 bp, Homo sapiens
gtgaccccaagcagctggaagcagtctgcagccaccggcgtggtggtgaggaagcggtccagagtgttcacc

SEQ ID NO: 5720 - DNA, 72 bp, Homo sapiens
gaactatgaaggttcatccaggtaaatcatctccccggctttctatccctgttagaaggaatgtgctagatg

SEQ ID NO: 5721 - DNA, 72 bp, Homo sapiens
agggtaaatgatccgagcccgtctatgaaacagcccgcctcagcttgcgcgctgggtgcttactcagtgaag

SEQ ID NO: 5722 - DNA, 72 bp, Homo sapiens
cgtcactaccctcctctcagtgctgggagcaagcacgcctcagggaggaggcaagatttcctctatgtatct

SEQ ID NO: 5723 - DNA, 72 bp, Homo sapiens
ggggtgctctctcccagggcgggaggtctgtcttccgccgcgtgccccgccccgctcactgtctctctctct

SEQ ID NO: 5724 - DNA, 72 bp, Homo sapiens
ccccacacccagcccaggcacccaagccctccctccggccttctctgctggggcttcacacacccagtacag

SEQ ID NO: 5725 - DNA, 72 bp, Homo sapiens
aggcagtacagatcaataagcaatctgcactacttcgcagagcattgcatatttatgagcatggtgaggagg

SEQ ID NO: 5726 - DNA, 72 bp, Homo sapiens
gtagatttttttttttttaaacccaccaaagataacgacatctgtacctgaggcaaatggtgaccagctgta

SEQ ID NO: 5727 - DNA, 72 bp, Homo sapiens
caggctagaaggaagggcggttggctccagctcaccgggcattcatatggtatatggaggagaactgccaga

SEQ ID NO: 5728 - DNA, 72 bp, Homo sapiens
gcgactctgggcaggaggagcccagagcgagggaccgccggcgcggaccaggcagaagcctctgcagctgtg

SEQ ID NO: 5729 - DNA, 72 bp, Homo sapiens
caaggaaagtatgttacaggcagaggaaataataacggcaaagttctggaggagagagagagactgtggctc

SEQ ID NO: 5730 - DNA, 72 bp, Homo sapiens
gttcttcacaatgtcctcatgttttttgtggttcacggcagcaagtaaagatgaactgtggaggttgcagtt

SEQ ID NO: 5731 - DNA, 72 bp, Homo sapiens
gcactggaaaggctgatttcagtccaaatgccattcgttaattctgtcattcattgacattcaccagttcct

SEQ ID NO: 5732 - DNA, 72 bp, Homo sapiens
ctcctgggaactttgaactgagcagcttcccaaaacgtttccaagcagggcagggctggaggcttaagaaaa

SEQ ID NO: 5733 - DNA, 72 bp, Homo sapiens
caggtgctacctagcatggacatttgcatagccaacggctgcagcctacagcctgcctttgcttctgtggtg

SEQ ID NO: 5734 - DNA, 72 bp, Homo sapiens
cggcctagttgccgaaaagactgcagcggccaccgcgtctgctgcttagtttgagtagtaacatgtgtctga

SEQ ID NO: 5735 - DNA, 72 bp, Homo sapiens
acagcagaaagcagcaaatataaggatcgagagcacggggtagagagagggctggcgatggacaccatcttt

SEQ ID NO: 5736 - DNA, 72 bp, Homo sapiens
ctggggggctgctctgtccccttccttgcgcgctgcggcctcagcccacccagaggccggggtgggagggcg

SEQ ID NO: 5737 - DNA, 72 bp, Homo sapiens
cttggcctaagccctttttatgttcagtgtcatctcgttctccctaatattaagaaaagggggttgcttgta

SEQ ID NO: 5738 - DNA, 72 bp, Homo sapiens
actgcagaactctgcacagctgcttttcattctcacgtccgcccccgcccaatctttgaaactaactttgat

SEQ ID NO: 5739 - DNA, 72 bp, Homo sapiens
agggtgtcgtcatactgaagtcaggcctctgcccacgtgtcatacagttttttttgtctgtctcttctattt

SEQ ID NO: 5740 - DNA, 72 bp, Homo sapiens
ccacctgtgatgcctgaatgcatgaaggcaggctccgcatagccctttcattcctatggatgtcccccacac

SEQ ID NO: 5741 - DNA, 72 bp, Homo sapiens
aacctgtcattcttggagtcatagaatgggggccacgaaaactgatttggaagttgtttgaacccaaaaatg

SEQ ID NO: 5742 - DNA, 72 bp, Homo sapiens
atcatttccccagagggatcttgataattgtgaaacgccaaacaacttgccagccatgagtcccaaatcaca

SEQ ID NO: 5743 - DNA, 72 bp, Homo sapiens
agcctggtccacacacacctgtcctcaccaccacccgtgtgcattcagtgatcatacaatcccttccagaaa

SEQ ID NO: 5744 - DNA, 72 bp, Homo sapiens
acccaatcacctcttaaaggccccatctctcaatacggccacattggggattcagtttcaacatgagtttta

SEQ ID NO: 5745 - DNA, 72 bp, Homo sapiens
cagtattagaagaaacttcattgtaaacttctaaacggatcaattcagtttactgtgttcctttctagccta

SEQ ID NO: 5746 - DNA, 72 bp, Homo sapiens
agttatggtaaggataaacagaagggctctggggccgcccagagtgcataccccccagggtgcagacggggg

SEQ ID NO: 5747 - DNA, 72 bp, Homo sapiens
agaggtggtttgggcagaggtgggcagcatggaggcggtggcccagggagtccctgtggttgcccgggtgga

SEQ ID NO: 5748 - DNA, 72 bp, Homo sapiens
gtgaggctgacagtcttgctgtaattgggagaaaacgagctgcagcacatttggcagattgagtcaccagca

SEQ ID NO: 5749 - DNA, 72 bp, Homo sapiens
atgacaccatctgagcctggcctccttccttctctcgctgctcactccttcctctttccctccatcccttga

SEQ ID NO: 5750 - DNA, 72 bp, Homo sapiens
ggctcaccctcgtgagcaaagccacaggtgcttcccgccctcatggagcttgcaggcttgaggcgggtttag

SEQ ID NO: 5751 - DNA, 72 bp, Homo sapiens
ctttcaccaggatagccaaaaggctaagaagcaggcgagggaagttttgcagaaacagcagaagcatgaatc

SEQ ID NO: 5752 - DNA, 72 bp, Homo sapiens
tcacgcttttcccaccagaagtctacctgtgcctgcgcccgccggacctgccggcctcttccttctcatcca

SEQ ID NO: 5753 - DNA, 72 bp, Homo sapiens
tcaagaactcccatcccggttccacgctgcgcgtccgccatccgaaccggcctcgcccctccaggccgggtc

SEQ ID NO: 5754 - DNA, 72 bp, Homo sapiens
accacggggataaagaggcagggatttgggataaacgtggcaagattaattgggaatgggcgaacacgcaga

SEQ ID NO: 5755 - DNA, 72 bp, Homo sapiens
ggaagccctgttctcacctgggcctcaccctgtgccgccctagtccagatttcaccggtctgagtgcgttgg

SEQ ID NO: 5756 - DNA, 72 bp, Homo sapiens
accaggctggagcgctggcccggccccccgcggctcgctgctccgcccgccgccattggcccgcggccctag

SEQ ID NO: 5757 - DNA, 72 bp, Homo sapiens
aggtaatattcagagaattctggagcttatgacgtcgatatctttgaggattataattcagcctacagcaaa

SEQ ID NO: 5758 - DNA, 72 bp, Homo sapiens
cctctgccatccccgacgaccagggctggggcgtccgccctcagcagccacaggtgggtttgcggcccctca

SEQ ID NO: 5759 - DNA, 72 bp, Homo sapiens
ggagatagagttggaggagaagttggtccactgcccgctgactgggccaccctggcacccccctcgagggga

SEQ ID NO: 5760 - DNA, 72 bp, Homo sapiens
gacccacagatgagtcacacaagtgagccactgatcgatctgataacaatgaatggacaaatgaaagaaatg

SEQ ID NO: 5761 - DNA, 72 bp, Homo sapiens
gggaccaatcaggacctgaagagatgattcatagacgtcaggcttacagtccaaaattgaaaggaaagtgcc

SEQ ID NO: 5762 - DNA, 72 bp, Homo sapiens
cttgaccccgtgtggctgtttgtggtagttggaggcgtcatgtcggtgctgggctttgctggctgcattggg

SEQ ID NO: 5763 - DNA, 72 bp, Homo sapiens
aagcgtgcaggtaaaatcacacacaggtcaaatcgcgcatccgtgactccacacggccaggtgattctgtct

SEQ ID NO: 5764 - DNA, 72 bp, Homo sapiens
tgatgacatttcctccatttccacaggctctcacccgtggggcgggacaccctgcgattacatttcctcaga

SEQ ID NO: 5765 - DNA, 72 bp, Homo sapiens
tttgagaagtggaattgttgggcaattcctcttaacgtatttctagagtgtttgataaatattgtctgattg

SEQ ID NO: 5766 - DNA, 72 bp, Homo sapiens
cctgagctctgatcaggggaagctctgactgccctcgccttcctgactgctgagtcacaggtttactccatc

SEQ ID NO: 5767 - DNA, 72 bp, Homo sapiens
gtcgactccagcgaaggtgagcgccacctcccccacgcagacacttccgtctgccccgggcctggccacggc

SEQ ID NO: 5768 - DNA, 72 bp, Homo sapiens
gggcttaggcattccaattctgatgtaatcacctgcgcctcagtcagagcagcatcaattcctgcttttaca

SEQ ID NO: 5769 - DNA, 72 bp, Homo sapiens
aagggaggtgccacagtcaagggtgaacttctaatcgctaacccctggtgtcatttgccctgagcagtcagc

SEQ ID NO: 5770 - DNA, 72 bp, Homo sapiens
atcctgctcacatgtggatcaccgagggcaggggccgggaggaagggggtcatctggctcacagccttgcac

SEQ ID NO: 5771 - DNA, 72 bp, Homo sapiens
tgtgcttgtctctgcagaaatgtcctggccccgtacgcggtgccctcggagctggtgctggtggaggagatc

SEQ ID NO: 5772 - DNA, 72 bp, Homo sapiens
ttcctttattaagcaaatatcttctgtctgcctaccgtatgcttgaccctgtgcaaatgaacaagacaaaca

SEQ ID NO: 5773 - DNA, 72 bp, Homo sapiens
catactaccaggaaagagaaagaaaaaaattaagacgcattagtgtaagtgatattaaagaaaatggccgga

SEQ ID NO: 5774 - DNA, 72 bp, Homo sapiens
ttgttcccaggaggtggttgagaaatttcggtaaacgcatgacgtcttgcttgaagagtcagacaaataagt

SEQ ID NO: 5775 - DNA, 72 bp, Homo sapiens
gtctcttatcagtaaggaatactggtcaattgggccgaaactgcaaatgagagagttgttatcagcggtgga

SEQ ID NO: 5776 - DNA, 72 bp, Homo sapiens
ccaggctctaaggaaatggatatcggagaggccttcgttgtggttccctagaagcagactctgaagcaagga

SEQ ID NO: 5777 - DNA, 72 bp, Homo sapiens
aagtttagcagttttgcacccagaaaaaaagaaaacggagaagggtaagcttgtaacaaacggatgggggtc

SEQ ID NO: 5778 - DNA, 72 bp, Homo sapiens
aaagagtgtaaaactggagtgtctgactagtgccccggatagggaggcttaataggtttggggtaactcatc

SEQ ID NO: 5779 - DNA, 72 bp, Homo sapiens
atctcaggcaaagagacaatgggacagacggccaccggcaccagccccagctccaattctgccgctcaggtg

SEQ ID NO: 5780 - DNA, 72 bp, Homo sapiens
cgcagggttcgccgcacaacgccgctggtgaggaccgagcgcatctgcccacagcgccccagccgcgcctgg

SEQ ID NO: 5781 - DNA, 72 bp, Homo sapiens
cgccccagccctctactggccagtgtccctccagtcgtccagcccttgctgccaggggccccgcccatgtgc

SEQ ID NO: 5782 - DNA, 72 bp, Homo sapiens
cacccaatttcacagaaataaatgaacaagggaagcgggcatcatgatatttcaaattgtgacagaactgct

SEQ ID NO: 5783 - DNA, 72 bp, Homo sapiens
gcctgccaatgcggtggagcctccagaagtcgtaccgtttgcagcggggaggagcttggccctgcctcttcc

SEQ ID NO: 5784 - DNA, 72 bp, Homo sapiens
agaccacaagttccttctggtgtcttgggaggcagcggtgtgaaaacaccacgcaagggtctggaggaggca

SEQ ID NO: 5785 - DNA, 72 bp, Homo sapiens
gattattattattgttccagaaggaagtactcttacggtttgttctgggaggctgccactaagagctgtaga

SEQ ID NO: 5786 - DNA, 72 bp, Homo sapiens
agcacgtcccagctgcttcttcctgaccctcaccacgaggcacagaggcacctgtgctgaaactcaagcaaa

SEQ ID NO: 5787 - DNA, 72 bp, Homo sapiens
gtcaatcacacaccttgtggtgaaagcgagctgaacgcactgatacatgaagacatttctgactcctccctg

SEQ ID NO: 5788 - DNA, 72 bp, Homo sapiens
aaactgcgcatcccagaggctctgggttccttccacgggaggggatggagaattcacttggagtttctttca

SEQ ID NO: 5789 - DNA, 72 bp, Homo sapiens
agcatggactgtttcgctcactgccccatccctgacgtacaggaggcgcttaaaaagtagttcagttacaca

SEQ ID NO: 5790 - DNA, 72 bp, Homo sapiens
gaagccgcgcggggagaccctggcgtggcccgcgccgcccaggatgactttcctggcaagttctgcagacgg

SEQ ID NO: 5791 - DNA, 72 bp, Homo sapiens
acaggcgttgctccttctcctgggcctctgtctggcggtctggctctgtctgtcttatccttggcttcctat

SEQ ID NO: 5792 - DNA, 72 bp, Homo sapiens
cgctcccgggatggggctgtgttgcccacgcctcgcggcgcgggcggacacacaccctgctaggactagctc

SEQ ID NO: 5793 - DNA, 72 bp, Homo sapiens
aaacttcaaccagacagtccacccgcctgacttttcgtgggtgcaagggccggtcccttgctcgttttttct

SEQ ID NO: 5794 - DNA, 72 bp, Homo sapiens
cctgggggattgtgaaatgacctcatgtggcagcccgcccgcggtgcccgcaaagccctccaccctcccctt

SEQ ID NO: 5795 - DNA, 72 bp, Homo sapiens
tcggggtcatatctctgctggttgcatttggccggcgagcggccagcggacaggaacagatgacgaggacag

SEQ ID NO: 5796 - DNA, 72 bp, Homo sapiens
agattggacatcccttgtgtagactaatgaagtgacgcttcttcccaggcatgatgacactgttttgacagg

SEQ ID NO: 5797 - DNA, 72 bp, Homo sapiens
gcgtcagcgcccgccccgcgccgcgccctcactgccgctgccgcggctacctgcggttcatctccgcacatt

SEQ ID NO: 5798 - DNA, 72 bp, Homo sapiens
cagccaggagattcagggagcaggtgaggctaagtcgctacccggtcccctgaccagcactttctttgtggt

SEQ ID NO: 5799 - DNA, 72 bp, Homo sapiens
tctcggtaggtgagtcactgccctggcatctcccccggatgcagctgagtcacccagccatgcctgctaggc

SEQ ID NO: 5800 - DNA, 72 bp, Homo sapiens
ctcttaggccaaggggtgcgccctggaggtcctggcgtgccccctctttcccctgcctccacaacttcgttc

SEQ ID NO: 5801 - DNA, 72 bp, Homo sapiens
ggacggtcccccagttgtcctggctgcaggcagtccgaacagtccgcttcctggaatattagccaggcagga

SEQ ID NO: 5802 - DNA, 72 bp, Homo sapiens
ccaatggtattggaaggccagaatcgaacttaagccgcttagttggtacaactgtaaaccctccctcacaga

SEQ ID NO: 5803 - DNA, 72 bp, Homo sapiens
attataaccacatcaaactctgtgggaagattgtccgccattttaggaagtaacagcgtctggtgacaactg

SEQ ID NO: 5804 - DNA, 72 bp, Homo sapiens
gagaggaaaatgggcctgtctctgccgttcaaagacgcttttgagtttgggtgatggctgatgctggctgtg

SEQ ID NO: 5805 - DNA, 72 bp, Homo sapiens
cagtttgcccttcggagagggaaagtttcctggaccgtgattcccgacatcctgcaaggtcccttctagctg

SEQ ID NO: 5806 - DNA, 72 bp, Homo sapiens
gagttcttcccttttctctctctccatgccctaaccgctcctttcaattccccaactcactttctgtgttca

SEQ ID NO: 5807 - DNA, 72 bp, Homo sapiens
ccagcagccatgggctcctctgttccgacctttcccgtgccctgcagttttctagggcgcactgaggctcga

SEQ ID NO: 5808 - DNA, 72 bp, Homo sapiens
ttgggacaagtcgaggcgtgcacttccccttgactcggacaggaaagagaatccctttctgtttgacacaga

SEQ ID NO: 5809 - DNA, 72 bp, Homo sapiens
ctagttcctcatcctaccttcattaactagcttcccgttgaccttgggaaagtcactcaacttctgcaaaac

SEQ ID NO: 5810 - DNA, 72 bp, Homo sapiens
taaccgttttccccaaacacgcggccctgagcctccggtgctttgcgaaagccgtcccctccggctggaatg

SEQ ID NO: 5811 - DNA, 72 bp, Homo sapiens
ttaccagtcttggtcgcaaaagcagccctttcaatcgcaccgaatttcccctggtgtgaaaaggcgccatcg

SEQ ID NO: 5812 - DNA, 72 bp, Homo sapiens
gaactggacccagccatggctgccggcagtgcaagcgaagccagggccatgggcacagctgagcctcagggc

SEQ ID NO: 5813 - DNA, 72 bp, Homo sapiens
agagcatagtccaccttgggcacccagagtagagacgatacatgtttctgctaagttaggcaagaaagtgat

SEQ ID NO: 5814 - DNA, 72 bp, Homo sapiens
atgtgaccctgttaagatttatgtaaaaatgtatgcgcatgtgtgtgttggctctaggataaagtgcaaatg

SEQ ID NO: 5815 - DNA, 72 bp, Homo sapiens
gggttctcgcttaagcagctgcagagaggagctgccgcttcaggaagcgggagaggtcgttccagaaggcag

SEQ ID NO: 5816 - DNA, 72 bp, Homo sapiens
caaaggatgttgaaggatgggttgctatagaatttcgccagattctctagaagggacattgtggcctttgag

SEQ ID NO: 5817 - DNA, 72 bp, Homo sapiens
caccaagcattcgactggcgtgcccagccactctccgtcatcgcagagaagtgctctatgtgagatttggtt

SEQ ID NO: 5818 - DNA, 72 bp, Homo sapiens
cgtgatgaattgcaagaatgtgttgtgttcatagccggggagctggcagaaatagcccagctaaaggactag

SEQ ID NO: 5819 - DNA, 72 bp, Homo sapiens
aggatccggtgttctggggagggttttcaacttgtcgtgggcacacaggataaggagtgccttcacctgaaa

SEQ ID NO: 5820 - DNA, 72 bp, Homo sapiens
ggacggggccctttgtcttgcctccgctttcttctcggcctttctccggcccctccctccctccctctcttt

SEQ ID NO: 5821 - DNA, 72 bp, Homo sapiens
tggggaagggcgtctgacatcagggctagaatttccgaaggtactgaccgacagccttaactagacaatcaa

SEQ ID NO: 5822 - DNA, 72 bp, Homo sapiens
gctggccaaggctggcacaaggacattcccagtggcgagagcatgagcaagggtcacggatgtgccaggagg

SEQ ID NO: 5823 - DNA, 72 bp, Homo sapiens
aagtcccgcctctgttacactccgtgccctgtgcccgccccaggacttggatcgctacatctgaccctggcc

SEQ ID NO: 5824 - DNA, 72 bp, Homo sapiens
ggtttcttgtccagatgctcaggctgaagaggtaccgtcggtccgaggtcactgcctggcaagcgaaggcca

SEQ ID NO: 5825 - DNA, 72 bp, Homo sapiens
gagaagacccctcttcctgcaggatttctcaagtccgttccattgagggttgctggccccttcaagtttcct

SEQ ID NO: 5826 - DNA, 72 bp, Homo sapiens
gtatgaaacctagagaaagtaaaaatgagaagtcacgatgctaggcagagagaatacgtgaattaaaataaa

SEQ ID NO: 5827 - DNA, 72 bp, Homo sapiens
catctctaagatgtaaaacgtcctgatgcacagctcggagaaaaagccctaccctacagctatatgtgacct

SEQ ID NO: 5828 - DNA, 72 bp, Homo sapiens
gtcccatgactttgtcgttgggatgcagccagccccgcgtgggcttattgacaaagctcccgtggcgggtcc

SEQ ID NO: 5829 - DNA, 72 bp, Homo sapiens
aaataacttggggagcttgtaagaaccctttgccccggacgcatcccagaacaagtacaggacaatgtctgg

SEQ ID NO: 5830 - DNA, 72 bp, Homo sapiens
gaggtctgaacagcagtccttctggtggtgcagcccgtgactgatggtttctttcaactgccccgttactcc

SEQ ID NO: 5831 - DNA, 72 bp, Homo sapiens
cttggtggactgctaagaactgctcccataactcacgtaaacatcccacatagccacttaatctgccctctc

SEQ ID NO: 5832 - DNA, 72 bp, Homo sapiens
tcgacattgttcctctctggctgttttttcctgttcgggtcccttcaaggcccaactgtgcccagccctctg

SEQ ID NO: 5833 - DNA, 72 bp, Homo sapiens
tgacttccgcaacattcctgcccaaaaagcagaatcgaaatctaaccacaaacccaaactgaggaaacatgc

SEQ ID NO: 5834 - DNA, 72 bp, Homo sapiens
tatcttctatctgtcctaaattgtcatatggagcacgtaaataaaacaatctgttcttctctaacatggacc

SEQ ID NO: 5835 - DNA, 72 bp, Homo sapiens
agttcccatcccacagatgcctcttaccaacaagccggcattctttatggccaggggaagccccaggagccc

SEQ ID NO: 5836 - DNA, 72 bp, Homo sapiens
ccttatgtcagttgtcaacaagcccttgtctagtgcgggcagactgttttccatcaagcagtcccagccagg

SEQ ID NO: 5837 - DNA, 72 bp, Homo sapiens
ctcaccctctttctgccgtacttcctcatctcctacgtgtggatgatgatattgtgccctgtgcatgttctt

SEQ ID NO: 5838 - DNA, 72 bp, Homo sapiens
ttgtagtccccaaaccagcagcatcagcattatctcggagcttgttagaattgcaaattctctgcccagccc

SEQ ID NO: 5839 - DNA, 72 bp, Homo sapiens
aaggggctgctgctgtgcaggacttgtggtggccccgggacccctccagagaatgtgtacttcatcctgggc

SEQ ID NO: 5840 - DNA, 72 bp, Homo sapiens
tccctggggatggagctgggtgccggtgcaggcatcggaggagcggtgccggggaacccgcctcctcacctc

SEQ ID NO: 5841 - DNA, 72 bp, Homo sapiens
ggtgactgaggagcccaaggaaagccggcagaagccgagtcctctagagctgggcttttggctctgaatcgt

SEQ ID NO: 5842 - DNA, 72 bp, Homo sapiens
aagtcagtggtttgaaggggtgcccacccttgctccgttgggacatagggacgcaggtgcctgtctcagccc

SEQ ID NO: 5843 - DNA, 72 bp, Homo sapiens
tgaaatatttgaaagcatcgaagtctagcatttcacgttttgcaagctggggaaaagcattcattccctgag

SEQ ID NO: 5844 - DNA, 72 bp, Homo sapiens
ttttgtttgaggtgtttcgggttttgttgaaactgcgaccctccttattggctgtagatttaaatgttgaca

SEQ ID NO: 5845 - DNA, 72 bp, Homo sapiens
cgacctgtttttaaattcttggtctccctgcaccgcgtccctcctttgctgcgctagctttatgacgcatct

SEQ ID NO: 5846 - DNA, 72 bp, Homo sapiens
tttcacatgcctgagtggatggtgagttcactggtcgttttgtttctccttctgtttcttgataatgagagg

SEQ ID NO: 5847 - DNA, 72 bp, Homo sapiens
aaggctctgaggcccagaagaactggcccgatccacgaaaaagcagaagctagggtagcaggatcacactga

SEQ ID NO: 5848 - DNA, 72 bp, Homo sapiens
ttaactgaccaccctttattttgcaatcagagagtcgagctggcagaactgaagtgtcttggcagctgcaga

SEQ ID NO: 5849 - DNA, 72 bp, Homo sapiens
ggagcggcctgaggatgcttaggatgagcgcagagcggaaaggaggattcgtgaaggctctctgatgccagt

SEQ ID NO: 5850 - DNA, 72 bp, Homo sapiens
aaaattccagaatgacaactgtacagcaagtctagcgagcagccagtccagattgaaataagaggaaggaag

SEQ ID NO: 5851 - DNA, 72 bp, Homo sapiens
agaggagggtcgccagctgggccgtgtcctttgagcgcctgctgcaggaccccgtcggtgtccgctacttct

SEQ ID NO: 5852 - DNA, 72 bp, Homo sapiens
atctgtcgtgccctcggtattgctctttgtctgcccgtgaataaagtgcagcattgtggttagtaatcccac

SEQ ID NO: 5853 - DNA, 72 bp, Homo sapiens
tctcagagatttcaaatagactcttctgcctgtaacgctttgcttctctctctcatttacggaattacctgt

SEQ ID NO: 5854 - DNA, 72 bp, Homo sapiens
gtttaaatcctggcttgcctcggtgctgctggcttcggtccgcagctccctctagccagcccacacccagct

SEQ ID NO: 5855 - DNA, 72 bp, Homo sapiens
ctgcgggggaatggagaggaggatgttcactcacccgaaccaagtaggaaaccccgggtcccatgactttgt

SEQ ID NO: 5856 - DNA, 72 bp, Homo sapiens
cctcatctttgcagctctcactctcaatgagatcacgtataaattgagtcctccttccaaatctcttacctt

SEQ ID NO: 5857 - DNA, 72 bp, Homo sapiens
gacaacacaggcaggggtggcctggcttcctttctcgtgttgttatcgggtagctgcctgctcagaacccac

SEQ ID NO: 5858 - DNA, 72 bp, Homo sapiens
gcgtgcccagggtcacgcctagtcacacagggagccgagaaacaaatccaggcaacccggcttttttttttt

SEQ ID NO: 5859 - DNA, 72 bp, Homo sapiens
aaagtgctgggattacaggtgtgagccactgcacccggcctctaaaagcagaattgacttgctttgctaaga

SEQ ID NO: 5860 - DNA, 72 bp, Homo sapiens
ctgagatgagggttcaagtgaataagtacaggaaacgtggcattttgttatatggctcactccattctggaa

SEQ ID NO: 5861 - DNA, 72 bp, Homo sapiens
ctggtctggggcaccaacgtccaagggggccacatcgatgatgggcaggcgggaggtcttggtggttttgta

SEQ ID NO: 5862 - DNA, 72 bp, Homo sapiens
ctgtcctgggcggatggaggccccagtggcagagacggtgccaccaggcagtcctttgctgaggtgtgggag

SEQ ID NO: 5863 - DNA, 72 bp, Homo sapiens
caaaagtcttcgctgcttggagtctgattgagaagcgacagccagtgagggtgaagacgcagaaaccttcac

SEQ ID NO: 5864 - DNA, 72 bp, Homo sapiens
gtttttacatgagagggccatgagtgttctcctggcgggatggagaagcattgttctggtctttgagcaaat

SEQ ID NO: 5865 - DNA, 72 bp, Homo sapiens
cagtgaaagcaaatgcttctggttgcgaaatccaccgaggatgccaatttagaggtgctattcaaatgtaca

SEQ ID NO: 5866 - DNA, 72 bp, Homo sapiens
tttattatttaagagttcttcaaatattgacttttcgttttcaaaacaaagtaagagtagaaaacggcactg

SEQ ID NO: 5867 - DNA, 72 bp, Homo sapiens
gggattggatgccaagtccttgggcttagctgagccgtatgctctctgagacattcttggtccctgtccttt

SEQ ID NO: 5868 - DNA, 72 bp, Homo sapiens
cagtttcaacaccacaggcttcttgggtgactcagcgggaatgctccgattcaaggcgatggaccgcccgag

SEQ ID NO: 5869 - DNA, 72 bp, Homo sapiens
cagtaaactgtgccaagccctgttagctgatctgccgggtgatttgtgaaagttatgtaacagcattactca

SEQ ID NO: 5870 - DNA, 72 bp, Homo sapiens
ggggcgtcagggagctctcggatcacagcagcccccgccctctcctaggcctggcccggcagagcccccaga

SEQ ID NO: 5871 - DNA, 72 bp, Homo sapiens
tcccgttaattattgtgcgcgagccatcgatcgcacgccgacacctgacccgtctgtatgaaatgggaatag

SEQ ID NO: 5872 - DNA, 72 bp, Homo sapiens
aagcgggagatgattcagcccggggttctgcccctcgcccctccagcagcctctacagttagggagctcttg

SEQ ID NO: 5873 - DNA, 72 bp, Homo sapiens
ggctaaaaactgtatttcctggacacccttgtgatcgggttgcggatgtgatgtagggtctgccagtgagaa

SEQ ID NO: 5874 - DNA, 72 bp, Homo sapiens
tggctggccttgtttcctgagtctgatctgtttggcggagtgggaggggtggagcaggacccggaccctgag

SEQ ID NO: 5875 - DNA, 72 bp, Homo sapiens
ccagttgtacctgaactccttggtgctccccagggcgggcgaggcagacaggctgcgagacttggcccggcc

SEQ ID NO: 5876 - DNA, 72 bp, Homo sapiens
ggaccccctgattgcgtaagagcaaaaagcgaaggcgcaatctggacactgggagattcggagcgcagggag

SEQ ID NO: 5877 - DNA, 72 bp, Homo sapiens
tggggtctgggctctgattggctgcgcccgggccacgcccccagccctttcccctttctcccccctcgaaag

SEQ ID NO: 5878 - DNA, 72 bp, Homo sapiens
caaccgcaggcgggtgctgacgacacctccacccccggctcgtaagctaatttgcgtcacatatggcgtaag

SEQ ID NO: 5879 - DNA, 72 bp, Homo sapiens
ttcgtagttcttttctgaacaacagccagagtctccgctgtgacccgaaagtattaatagcacccgaagggc

SEQ ID NO: 5880 - DNA, 72 bp, Homo sapiens
gactggagtagctgtcctggtccctaaacacagcccgagcattttgggggaaaggacagggaggactggaag

SEQ ID NO: 5881 - DNA, 72 bp, Homo sapiens
catttccctcatttctttcctacacttaaatacctcgtgtatggtgcaatcagaccacaaaatcagaagctg

SEQ ID NO: 5882 - DNA, 72 bp, Homo sapiens
taaagtgggcctgtgcccttttgcactgcgggacacggctcaggaccagcaggcatgcctccttggtctcat

SEQ ID NO: 5883 - DNA, 72 bp, Homo sapiens
acagccagggaggaagtcaccttgaaagaagcggccgctgggctgtgcggctgcggcagaggagagggccag

SEQ ID NO: 5884 - DNA, 72 bp, Homo sapiens
tggtaaatgcttcttacaaaacctgtagcttccttcgcatgcatcctgtaactcctgctgacttactgaatt

SEQ ID NO: 5885 - DNA, 72 bp, Homo sapiens
atagagttagtcccctctgcatcagccctgacaggcgagcatctcctctcttcttgcatatccctgtaatag

SEQ ID NO: 5886 - DNA, 72 bp, Homo sapiens
ggaggatgtggcttgtgtgggggctgttgtcgccacgtgttagccaaccatgtgcatgtgaaagaggctgac

SEQ ID NO: 5887 - DNA, 72 bp, Homo sapiens
tatgtgaacgtcagacaatgggatcttaggccagccgtgggcagtgttcagtgttttctcaatcttcagttt

SEQ ID NO: 5888 - DNA, 72 bp, Homo sapiens
ggccctgggagatgggtctggcgaggctcgtaggccgcggattggctggctgggtgcaggggggtgcgggaa

SEQ ID NO: 5889 - DNA, 72 bp, Homo sapiens
ccctcttcatgccagtggccaggcacttctgatagcggcagtactgacagcggttccgctggcgcttgtcca

SEQ ID NO: 5890 - DNA, 72 bp, Homo sapiens
atggtcatttggcaggaaggtggcatgggatcccacgtatgacacgcctcattctgtgatgaaacaccccct

SEQ ID NO: 5891 - DNA, 72 bp, Homo sapiens
caagtatttcatacacctactgtggtaagtaaaaccgcaaaacaaataattgtagcatcaactattttgagg

SEQ ID NO: 5892 - DNA, 72 bp, Homo sapiens
cactgacttctgagagaggaaacacctacgcaatccgctgacagtcttggttggcaagccacagagtgtgac

SEQ ID NO: 5893 - DNA, 72 bp, Homo sapiens
ggcttataccatgtatctacttcttaattctgttccggttctttggtctgagcatttaggttgcgcctgtgg

SEQ ID NO: 5894 - DNA, 72 bp, Homo sapiens
tgatgtagctgctgggaggacagagctccgagtcacgtggcttgggcgggcctccccttcctggtgtccaca

SEQ ID NO: 5895 - DNA, 72 bp, Homo sapiens
ccttgcctcatcagtgctataaaaagccctttagccgggctgtaatttgactctcctctctaatgttacgca

SEQ ID NO: 5896 - DNA, 72 bp, Homo sapiens
cactgctctccggtgagtctggaaccctggggagacgaggaaaggctcagggttcagtttttggctcagcaa

SEQ ID NO: 5897 - DNA, 72 bp, Homo sapiens
cggcggcgccggctgggggattggaattcaggccgcgaaccaacttgcaggaagaggagttccatgttggac

SEQ ID NO: 5898 - DNA, 72 bp, Homo sapiens
aggcctggtgactcaacaatctgggatggggagcacggtaccctcgcctccccggcaggcaataccccatag

SEQ ID NO: 5899 - DNA, 72 bp, Homo sapiens
actcacgcgagggtccgcggcttcattcttgaagtcggtgagaccaagaacccaccgattccggacacacca

SEQ ID NO: 5900 - DNA, 72 bp, Homo sapiens
ctttgtttcaaattgctatttggcagtcattaacacgggataagagtaattggtcaactagatggcagagac

SEQ ID NO: 5901 - DNA, 72 bp, Homo sapiens
ctctgagtactgaagtttttatagttccctgagggcgcacactgtgacactcctgcattctctgctagtgtt

SEQ ID NO: 5902 - DNA, 72 bp, Homo sapiens
tctaggattacaggagttgtaggtatatggttacccgaaggattagatgcaggcagagagtgcatgtgccca

SEQ ID NO: 5903 - DNA, 72 bp, Homo sapiens
cctgtagagagtttcgaagttaggaggactcaagacggtccctccctggacttttctgaaggtagaaccagc

SEQ ID NO: 5904 - DNA, 72 bp, Homo sapiens
aggattgccgcagtcgtttcagacacgatgggtttcgggcctccaaggaccaaaaaatacatcattttctct

SEQ ID NO: 5905 - DNA, 72 bp, Homo sapiens
acagattcgcttgctgaaatggcgaagcaagttcccgcagctggccaggctgagctgtttctgaagctcaga

SEQ ID NO: 5906 - DNA, 72 bp, Homo sapiens
gcagttgccccagtcatgagatgactcacttaacccgtctcctttaagtgagctgggctgggaggcttccta

SEQ ID NO: 5907 - DNA, 72 bp, Homo sapiens
attgcggaagtcacaactcctgttaccttttgccacgccactcctgagcagtaaaaggcattattgaaaata

SEQ ID NO: 5908 - DNA, 72 bp, Homo sapiens
cttaacctgtgtcaggtgccctgggctctgccaaccgccagctcccgactcggggcgtcgtccctcacccat

SEQ ID NO: 5909 - DNA, 72 bp, Homo sapiens
ctctggcactcaagacaaaatcttacaaaagaggacgttcagagggaggaagagattggggttgcctttcag

SEQ ID NO: 5910 - DNA, 72 bp, Homo sapiens
ccgcggtatcttcccgcccgctcaccaaaagtgcgcgcggcagggacggacccactccatggatcgcgcctc

SEQ ID NO: 5911 - DNA, 72 bp, Homo sapiens
tcccaagtccgcgtgcctgcccagccccatctaaacgcggggtacggagctcgcaggtctctcttaatctga

SEQ ID NO: 5912 - DNA, 72 bp, Homo sapiens
aatctagaccacacaagcagaagtaagagtgccaacggggtgtggaccagtgtggttacaatagggcttgtt

SEQ ID NO: 5913 - DNA, 72 bp, Homo sapiens
gaggcgcacacgtttcatctaggcttcgggcggggcgcagcaggtgggtgaggctgcggtggtggctgctgc

SEQ ID NO: 5914 - DNA, 72 bp, Homo sapiens
tggtctggtgtgattttgaatgatttggaaattctcggttggcagaaagaagataaatgcataccacaagat

SEQ ID NO: 5915 - DNA, 72 bp, Homo sapiens
gcgctgtgcatctttatctgcacagagttttgtcacgtccacagtgcttttcacacgcactatctaatctga

SEQ ID NO: 5916 - DNA, 72 bp, Homo sapiens
aaatgggtgcgcgtcacccctccccgtcagggtgtcgccaggcctccgggaaccgaactcctaaatgttcct

SEQ ID NO: 5917 - DNA, 72 bp, Homo sapiens
tctcaaggtagcttaaaacacaagggaacacacaccgaagccataactgaggctcctcctggctgtgctcta

SEQ ID NO: 5918 - DNA, 72 bp, Homo sapiens
aggctgagtcatccttttccctgcctgggtcaaggcgtggcttctccaatcccttacaaaatgcttccgccc

SEQ ID NO: 5919 - DNA, 72 bp, Homo sapiens
tttacccccatggctaggcatagaaattaaaatctcgcctccccaaggtgggaaggtcatggaaaccagaac

SEQ ID NO: 5920 - DNA, 72 bp, Homo sapiens
actgggaggatttttgtattgagagggcagtgaggcgtgaaacctcagactcctgtggtacttcctgctacc

SEQ ID NO: 5921 - DNA, 72 bp, Homo sapiens
actgatgggtgggaaaagaccggtgaagcaataatcgtgtaagtgaaagcaatgactctctggtgtcctcta

SEQ ID NO: 5922 - DNA, 72 bp, Homo sapiens
ttggccacaactgtcccagtgcagccccccagggacgggagggcagaaagcagccttgctcaatgtcctgtt

SEQ ID NO: 5923 - DNA, 72 bp, Homo sapiens
cttgggctgcaggactttgacctaatcagagtcatcgggcgcgggagctacgccaaggttctcctggtgcgg

SEQ ID NO: 5924 - DNA, 72 bp, Homo sapiens
gacccgcagcatgaagtgggctacttcctgtttctcgccagtgcttttgcagaggctggtccctctgtcaac

SEQ ID NO: 5925 - DNA, 72 bp, Homo sapiens
ctacttcctccacctttcttacatttgcacagtttcgctgattcccaggtgtctgcaggtattgtagtttgc

SEQ ID NO: 5926 - DNA, 72 bp, Homo sapiens
cgttgacttcttctctgtggtctgggaggagatgtcgaggcccccgagggaggcggtggtgaaatcttggct

SEQ ID NO: 5927 - DNA, 72 bp, Homo sapiens
ctcgagacagttcccaaattcctgacttctgttaccgcgactgttcttcgcaattccacctcggcctgtgtt

SEQ ID NO: 5928 - DNA, 72 bp, Homo sapiens
aaaactatgtacacctagagagagagagagacacacgtctgtatgacagagaggcagggtttgggaatgttc

SEQ ID NO: 5929 - DNA, 72 bp, Homo sapiens
ggaggctccgaaaacctggggtagggggagcgcaccggggctttagagggcgcagcggccaagggcaagaaa

SEQ ID NO: 5930 - DNA, 72 bp, Homo sapiens
agtgattggcattgggcccactttcccctaggctgcggtctcgcagatgccagtaagtgccctcccccacct

SEQ ID NO: 5931 - DNA, 72 bp, Homo sapiens
gcttcagacactgagataattgtgtaactctacagcggaaaatgccattggagagtacttgctgacctcaca

SEQ ID NO: 5932 - DNA, 72 bp, Homo sapiens
ctcctgtttcagagacaccactgaatacagagcagcgagcactgaaggcttccctctttccttaaacctgtc

SEQ ID NO: 5933 - DNA, 72 bp, Homo sapiens
gtttaaggcctttaactatgaggcaggtcattaaccggctggtgaagcaacagcacattgttctgttatttt

SEQ ID NO: 5934 - DNA, 72 bp, Homo sapiens
tgtataacatgtacggtaactgacacattatatctcgtacactgatacaaagaagtggttttgaaataatac

SEQ ID NO: 5935 - DNA, 72 bp, Homo sapiens
ttgtgaaactgagcccttaacctgtggggcctgcccgaactccagatgattagtattaggattgaatggagt

SEQ ID NO: 5936 - DNA, 72 bp, Homo sapiens
tgcgcaaggcagctagcctcacggaggatcgggaccgtgggcgggatgccggtgagagtctgggagaggaat

SEQ ID NO: 5937 - DNA, 72 bp, Homo sapiens
ggtctgggctgagccaaagggtggtgaccctgccacgtcctgccgggtatgggagtggcaatgcgagcctag

SEQ ID NO: 5938 - DNA, 72 bp, Homo sapiens
agaagaaaagagaagtggtgttcacagtcgaaggacgtgcttttcagtagtgattcagacaattcagaaaag

SEQ ID NO: 5939 - DNA, 72 bp, Homo sapiens
cactgagtgaaagggactgggccagctcagtggaccgtgtggaacaggaacagctggagtggagttgaggac

SEQ ID NO: 5940 - DNA, 72 bp, Homo sapiens
aaacaaggagttggcatgccacatttccagcccctcggcccaactgcttcaggacccctgcctgccagcctc

SEQ ID NO: 5941 - DNA, 72 bp, Homo sapiens
aggccaaaatccccgcgggttggtcggggcgggagcggggctcggtgttcggggctgacggcgggggcgagg

SEQ ID NO: 5942 - DNA, 72 bp, Homo sapiens
ctcgcactgttcctggctcggaagcacctcaagaacgtggaggcgactcacttcagccctctggagcctgag

SEQ ID NO: 5943 - DNA, 72 bp, Homo sapiens
gtctttatttagttacctaggtaaacagccagatacgctgtgtgaactctgtgacccagcctcctggggtac

SEQ ID NO: 5944 - DNA, 72 bp, Homo sapiens
ctataaatctgaagattagctttccagccattgaacggtgattttgagccactgtttgccaaatcagacagg

SEQ ID NO: 5945 - DNA, 72 bp, Homo sapiens
aacttctttgacgtaattaaacaacttttttcagacgagaagaacgggcaggcggcccaggcccccagcacg

SEQ ID NO: 5946 - DNA, 72 bp, Homo sapiens
acaggaagctggggtgtttgggactgaggcttcatcgtggcagctaataatgtcagggagcatgagcacttg

SEQ ID NO: 5947 - DNA, 72 bp, Homo sapiens
ctcattgcagaccggaaatttcagcatttcaacaccgttctggaggcttacatccaacagcatttcagtgcg

SEQ ID NO: 5948 - DNA, 72 bp, Homo sapiens
tactgtgtttacacagtagcaaagccgggatcccccgcagatatcccctgagatttgtacttgttcttaccc

SEQ ID NO: 5949 - DNA, 72 bp, Homo sapiens
aatgtggaagttgagacccagtgggggtaatggcccgtcctgggcactcagtgcatgaatgctggaagccaa

SEQ ID NO: 5950 - DNA, 72 bp, Homo sapiens
attgtcacctgtggcttgttcatccgttcatttcgcgtgcactgaggacctctgaggaccttgcgccagact

SEQ ID NO: 5951 - DNA, 72 bp, Homo sapiens
taagggcgcttcctgggtctgtgattctgtaggttcgggaagcctggaggatgtcagggtcacccacagagg

SEQ ID NO: 5952 - DNA, 72 bp, Homo sapiens
tgcagacgcacgctgggcagcacgggaaggcaggccggtgcctcctgccaggtgctagttgtagtggatctg

SEQ ID NO: 5953 - DNA, 72 bp, Homo sapiens
cctcaggctggtggcaggggacagcccccatcgcccgcagagcgcactgtgcaaacatgagcctcatgtcta

SEQ ID NO: 5954 - DNA, 72 bp, Homo sapiens
gtaaacagtcacaaacaagtgattcatattcagggcgcagcctttttgacaggaaaacagtaatcaagagtt

SEQ ID NO: 5955 - DNA, 72 bp, Homo sapiens
gattaaatagtaataaagacgaaaacaatcgtggccgttcacgtgggcaaggctgtgaatcatggccattca

SEQ ID NO: 5956 - DNA, 72 bp, Homo sapiens
tggctcccgccggtggctgcaggtgtgccatcctccgctggcgtgccatcctctgacttgcgtttcttgcgc

SEQ ID NO: 5957 - DNA, 72 bp, Homo sapiens
aaggagaagacctatcatcatgtcacgggagctcacgttccataccaggaaaggagtgttcctgtcaccagg

SEQ ID NO: 5958 - DNA, 72 bp, Homo sapiens
ctgtgttcctttcccaggaagcccccagcagctaccgtgctcatgccccagcatttcagggaccaagatctg

SEQ ID NO: 5959 - DNA, 72 bp, Homo sapiens
aaataactctaattagatatcctctttgccagattcgcaggattgccacaccactgagggctggggactgtg

SEQ ID NO: 5960 - DNA, 72 bp, Homo sapiens
ctgatgtgttttgatgcccatgacacattcctgagcgccgcttgctgtcttaccatttggcctgttcctgta

SEQ ID NO: 5961 - DNA, 72 bp, Homo sapiens
tagaaggagggtgaaaaagagtgtgtgcatgcacgcgtatgtgtgtgtgtgcatatgtgttgaacagaagca

SEQ ID NO: 5962 - DNA, 72 bp, Homo sapiens
actttatccctcttcagggaggggcagaggtttcccggaagagagaaaaatccaagtgtattgtgaaacatg

SEQ ID NO: 5963 - DNA, 72 bp, Homo sapiens
gggctgggctgggctggtaggacctgctcccagggcgggaggggacacacccacctcagcagatctcagccc

SEQ ID NO: 5964 - DNA, 72 bp, Homo sapiens
tgttttctatagaagtttattcccaaaacagagcgcggcttcacggaacaatttacacagacaggaaagagg

SEQ ID NO: 5965 - DNA, 72 bp, Homo sapiens
gtgctgccagggctggaagaagcggcacccgggggcgctcacctgtgaaggtgaggctgggtcttccgggcc

SEQ ID NO: 5966 - DNA, 72 bp, Homo sapiens
agacaaggtctgtcaccgcaggcctgggggcagggcgtgcccccagactctgccgcctgctgcgaggccagt

SEQ ID NO: 5967 - DNA, 72 bp, Homo sapiens
ggtttggcgaattggctcagatgacggttacactccgctgcgtcttcttccaaaggcccagtcaggccaagc

SEQ ID NO: 5968 - DNA, 72 bp, Homo sapiens
cttggaggaagaaggaaatgggaaatggctgctaacgggtatagggtttctttgtgggatattgaaaatatt

SEQ ID NO: 5969 - DNA, 72 bp, Homo sapiens
ccctgacatcctccctcatgcatttgttgtgatctcgtgtggccctgctctcagctcaccccacttctcttg

SEQ ID NO: 5970 - DNA, 72 bp, Homo sapiens
tttgaagtggactctcagaaagatgaggaaggtggcggtgctgtagacaggtcaaaggacaatgacttagga

SEQ ID NO: 5971 - DNA, 72 bp, Homo sapiens
gctgggggtggggctgtttctggaacctaagcacacgtaccacctccccttcctctgacctaatgagggctc

SEQ ID NO: 5972 - DNA, 72 bp, Homo sapiens
cctaacgccggagtgcgttgatctgtgggtccaaccgctccctggcctggggccctagccacttttgaagcc

SEQ ID NO: 5973 - DNA, 72 bp, Homo sapiens
tgacctcctggactcaagtgaccttcctgcctctgcgatagtttttcatggatgcttctagtagttttttgg

SEQ ID NO: 5974 - DNA, 72 bp, Homo sapiens
aaatggtaaaagaagaatttcaggctccaaagctacgcagcccaacctaaagctagagttttactttctggg

SEQ ID NO: 5975 - DNA, 72 bp, Homo sapiens
ccgtctctggagcacaaagacccccggcccctgcgcgacccggacgagctcgcattcagccaacgactcctg

SEQ ID NO: 5976 - DNA, 72 bp, Homo sapiens
ttcacccacttccctcgtgtctgttccatctcctccgaaagataaccagtatctccagatgacaaggaacca

SEQ ID NO: 5977 - DNA, 72 bp, Homo sapiens
ttctactactgtagggtgctcccaaatattgctcacgtttaatacttacaacaactgctacaaactaggcaa

SEQ ID NO: 5978 - DNA, 72 bp, Homo sapiens
gggcgttggcagcgggcttgcttgggcacagtctgcgggccggagcagaacttccgcccctggtcagatccc

SEQ ID NO: 5979 - DNA, 72 bp, Homo sapiens
tttccccttagaatggtgccaggttagtcattccacgctcctggaaagggaaatgagctttttattccaacg

SEQ ID NO: 5980 - DNA, 72 bp, Homo sapiens
atttgaaaagggaagtagtaggatgatgtcaacagcgattagcttgaccctacatggctgactgctgtggtg

SEQ ID NO: 5981 - DNA, 72 bp, Homo sapiens
ctcagactcccctgggactaaggcatgcaccaccacgcctggctaatttttagtagagacagggtttcacca

SEQ ID NO: 5982 - DNA, 72 bp, Homo sapiens
gccaccgtctgtggaaacatttgtggttgtcactccggagaaggggtggtcctggcatctggtaggtagggg

SEQ ID NO: 5983 - DNA, 72 bp, Homo sapiens
ttctccttttgatttcctccacaaggtcttctcttcggacatccacctggccaggatgggagaagaaggtgg

SEQ ID NO: 5984 - DNA, 72 bp, Homo sapiens
cttagcagcctgtggcttcaaccactcagctacctcgtcaggactatttgtgtctatcttaaacaatgagtc

SEQ ID NO: 5985 - DNA, 72 bp, Homo sapiens
tctgcaggtcatcataacacaagctcattcatcagcgagtgtcttaagagtgaagagtcatggctgaaagca

SEQ ID NO: 5986 - DNA, 72 bp, Homo sapiens
tccatggccctaatcttgtgtgtcatctggagtcacgcagagaacaggagactaattgttctgtgtccagac

SEQ ID NO: 5987 - DNA, 72 bp, Homo sapiens
ccaggatagggaaccaggacagctgggctctaattcgggtggtaattttggaaacagtatatttcctctagg

SEQ ID NO: 5988 - DNA, 72 bp, Homo sapiens
ctctgtgctgggggtcagggggttggtgaagaaggcggcaaaaggaagagtggtgaaaaaatagaatgaaca

SEQ ID NO: 5989 - DNA, 72 bp, Homo sapiens
caaagggcgtgggttgccaaatgcttaggaacttccgctttcagtgtttagcaggttagcggggaaatatta

SEQ ID NO: 5990 - DNA, 72 bp, Homo sapiens
cacttaattttgtttccagtagtatttccctgtaccggcagagttcacaaacacatttgaagaggctttttc

SEQ ID NO: 5991 - DNA, 72 bp, Homo sapiens
ccagccacaataccctgtgggccgtcagactagagcgggtgatgagtgggtgctggatgctaggtaaacgga

SEQ ID NO: 5992 - DNA, 72 bp, Homo sapiens
gtattccagaactgtgcctgtgccactgctgagcgcgtagttaactcctgcaggggcagagcaggctggttc

SEQ ID NO: 5993 - DNA, 72 bp, Homo sapiens
ccaacttcagtgcctgggacaagccggctcgtgcccgccgcctcggctgcagggccctccacctgcagcgct

SEQ ID NO: 5994 - DNA, 72 bp, Homo sapiens
cggaagcctctgagccttcagtgccctggggcactcgtggttcctttccagtcccaagtcgacagccctgtg

SEQ ID NO: 5995 - DNA, 72 bp, Homo sapiens
tctgggcgtggtggctcatgcatgtaatccctgcacgttgggaggctgaggcgggaggattgcttaagctca

SEQ ID NO: 5996 - DNA, 72 bp, Homo sapiens
gaggtcagcggacacagccagggtctcaggaggcgcgctctgcgcgctgtttcctttcttccctgggtgatc

SEQ ID NO: 5997 - DNA, 72 bp, Homo sapiens
gacactgggcaatccagggccctcctcgagggaagcggggtttgcgccagggtccccagggctgtgcgaaca

SEQ ID NO: 5998 - DNA, 72 bp, Homo sapiens
aaactcagtgatgttatgtgatttttccaagatcacgcagcattggcacttggcagagctggggctgaaatg

SEQ ID NO: 5999 - DNA, 72 bp, Homo sapiens
ttgctcaggtggagcacctgccctggggccagctccgtccctggggtagggggagagctctctgggtggggc

SEQ ID NO: 6000 - DNA, 72 bp, Homo sapiens
ggctatgcctccccatcagattggaagcttccaagcgcaggggctgttcctccccgatcagcgaggaggccc

SEQ ID NO: 6001 - DNA, 72 bp, Homo sapiens
aaaacggagcttttttgccctgcgtgaccagatcccggagttggaaaacaatgaaaaggcccccaaggtagt

SEQ ID NO: 6002 - DNA, 72 bp, Homo sapiens
cacccttgcagccacgatcccagctctccctccagcgacttcccgcagcctgaacctcccagctccggctag

SEQ ID NO: 6003 - DNA, 72 bp, Homo sapiens
cctccagtaaaagagtgagtcagaccagagaagggcgccccctcgtggcagtgcccacaaagtccaggcagc

SEQ ID NO: 6004 - DNA, 72 bp, Homo sapiens
caatgcccggctaatttttgtatttttagtagacacggggtttcaccatattggtctcgaacgcctgacctt

SEQ ID NO: 6005 - DNA, 72 bp, Homo sapiens
attgtcctgcgtggaagctgggccacccacagtggcgtgggaagcctctcagatgctggattctaatgggct

SEQ ID NO: 6006 - DNA, 72 bp, Homo sapiens
gagatgctcacacaggactgaccctggtgccccagcgcatccgggaaaaaggaaccacaaattcctcgggaa

SEQ ID NO: 6007 - DNA, 72 bp, Homo sapiens
agcttgctcttgccctctgttacaacgatgaaatacgcctgggctagcctgctggaagatgaaagacacatg

SEQ ID NO: 6008 - DNA, 72 bp, Homo sapiens
gtttttctggaattgatacatcctttccttaaatacgcaaatgctgcctttgctttgagtggcttggtgttt

SEQ ID NO: 6009 - DNA, 72 bp, Homo sapiens
tatcacaaagacactcaagcagcactgtgaagaggcgcaggtggtaaaactgaagaccttcacaaacagcca

SEQ ID NO: 6010 - DNA, 72 bp, Homo sapiens
gaaattgcaggtcaaagcctccgcattaaagcacccgatgaggcaaagctacaattatgtgagccatgtgtg

SEQ ID NO: 6011 - DNA, 72 bp, Homo sapiens
gatatgagatgggccccagagaaagaggtggctggcgaaggtgttttccttagttatggggtgagagtggga

SEQ ID NO: 6012 - DNA, 72 bp, Homo sapiens
aaaaaaaaaaaatgaattaagaaaaaacatttggacgaaaagaccagttggcaatctactacaatggtccag

SEQ ID NO: 6013 - DNA, 72 bp, Homo sapiens
ggtgggtcagagccaggctccagagctcggccacccggggctgtggcttatcctggcttcaccacttcctag

SEQ ID NO: 6014 - DNA, 72 bp, Homo sapiens
cccgcctcagtctcccaaagtgctgggattataggcgtgagccaccgcgcccagcccctggtgccttcttta

SEQ ID NO: 6015 - DNA, 72 bp, Homo sapiens
tgagacaggggcatacccagaaccctggtgatccccggaggatgggggccacataacaaacctgctgaccga

SEQ ID NO: 6016 - DNA, 72 bp, Homo sapiens
ggaagtagaaaagagagaacaatttcagaagcagacgaaaggaacagtaataggaagatctagcaaggatgt

SEQ ID NO: 6017 - DNA, 72 bp, Homo sapiens
aaaagagtcaacaggatgtgggggtgagcagcaggcggggcacacatgactgaggtctgcagtctgaagatg

SEQ ID NO: 6018 - DNA, 72 bp, Homo sapiens
atcttgacactagaaaatgctcttatcctgctctgcggcctgggttgctccgcctgtgggtggacccgctca

SEQ ID NO: 6019 - DNA, 72 bp, Homo sapiens
ggctaatggcaagggaatcttgagatcctgtacggcggctgacccataaaatctacctagttctaaaattct

SEQ ID NO: 6020 - DNA, 72 bp, Homo sapiens
aatcccagccacttgtacactctgatcctatacaccgtcaggagtctcccatcattacccctttacttttct

SEQ ID NO: 6021 - DNA, 72 bp, Homo sapiens
gccgcagaagactctgctgggtcagggctatcaggcgcctctcagcgccaaggtcttctcctcatgggactt

SEQ ID NO: 6022 - DNA, 72 bp, Homo sapiens
tctgggcacggtcggtgactgctctttgtaggtctcggtgaaaacctgcggaggaatgagtgagtgtaagaa

SEQ ID NO: 6023 - DNA, 72 bp, Homo sapiens
tggcttccaaggtgctgctgggggtggagatgcagcgtctggccacacagctggcagtcaggaagctgggga

SEQ ID NO: 6024 - DNA, 72 bp, Homo sapiens
ggctccttctaagatgctgctagctattcctagcccgttccccaatacttctctgcccccaccttttggaat

SEQ ID NO: 6025 - DNA, 72 bp, Homo sapiens
tggggccccggttccagggcgggtgggggacccatcgtctgatgccaaggggcgtggtaggggcggctgcct

SEQ ID NO: 6026 - DNA, 72 bp, Homo sapiens
tctgtcgggtcacagccactctcagacgtcacctgcgagcactggaaaccccactggcagcccttgacagtt

SEQ ID NO: 6027 - DNA, 72 bp, Homo sapiens
tagggggggaacgaggccccaccccctatccctatcgcctctgcctttataacggctgctactctctgagca

SEQ ID NO: 6028 - DNA, 72 bp, Homo sapiens
gcggggagagcgtgtctgtctgcgctttcctctcccgggttaatattaaccggcagctcctgcgttccggaa

SEQ ID NO: 6029 - DNA, 72 bp, Homo sapiens
ttatacgttggggagtgccagatgtcaccatctttcgttcttcctctggggctggtcaaatccccctgagaa

SEQ ID NO: 6030 - DNA, 72 bp, Homo sapiens
actctggacttgcgcaattacaggaaaggccactacgctgacacatcatgtcaatggcactgagctaggagg

SEQ ID NO: 6031 - DNA, 72 bp, Homo sapiens
cagaagccccaaactgctcccgctacttccagtttcggtgtgagaatggccactgcatccccaacagatgga

SEQ ID NO: 6032 - DNA, 72 bp, Homo sapiens
ttgtcaggttgctctgggcaatgttgatcatcacccgccttatcggaaggtatggagaggggaggaagttct

SEQ ID NO: 6033 - DNA, 72 bp, Homo sapiens
gtttggccaatgaccatagtctgccctccagggcccgtgaagatggaagagaccttgggcagagtgaagggc

SEQ ID NO: 6034 - DNA, 72 bp, Homo sapiens
ggcagctggtagcccgccccgagatgcattcagaacggatgtgcctccaacggtctcctcttgttcagcctc

SEQ ID NO: 6035 - DNA, 72 bp, Homo sapiens
tactgccagtgcttttgctcagcacttgggcacttcgtggccgtgtgtctcatatgatgttcataatgcttt

SEQ ID NO: 6036 - DNA, 72 bp, Homo sapiens
cactggcagtgaacaccatgtctgcaggaggtggccgggcctttgcttggcaagtgttcccccccatgccca

SEQ ID NO: 6037 - DNA, 72 bp, Homo sapiens
gggtgtcccggagcggtgctgaggcgctgcaggcccggcttctggctgcgggggagctgtaccctgaagcct

SEQ ID NO: 6038 - DNA, 72 bp, Homo sapiens
tggcctcgggactgcccccaccgacagtgcgtgcgcggggagaggtcacttaaaactgcattttcgaacatt

SEQ ID NO: 6039 - DNA, 72 bp, Homo sapiens
tgttggggcccctggcaggagccctcacacagtggcgggaaggaggcagaggcctgtctgcactgaggactg

SEQ ID NO: 6040 - DNA, 72 bp, Homo sapiens
agtgcagaacccgcaagtgggggggagagatggcccgggaggctgcccccgcgctccacagcaagaggccac

SEQ ID NO: 6041 - DNA, 72 bp, Homo sapiens
ctggattgagtcacatgagtaactgctcctggacccggggactgtccacgaaaactgacttgcctgcttcct

SEQ ID NO: 6042 - DNA, 72 bp, Homo sapiens
cccagaacacccttggggcgcaacttcccggtgaacgtcccgtctcctcagccacccacagatgctgccaca

SEQ ID NO: 6043 - DNA, 72 bp, Homo sapiens
ccactgtgcctggctcaatcctgtatttaaatacccgtcctcagcaaggcttgccctcttctctgagtgctt

SEQ ID NO: 6044 - DNA, 72 bp, Homo sapiens
tcacagagtcacaaaaaaggttgcataaaatcacccgtctgcagactgtttacttgcctgaagtgtcatgcc

SEQ ID NO: 6045 - DNA, 72 bp, Homo sapiens
tccttgggctgcccgtgcttcgtgctttggactaccgcccagcagtgtcctgccctctgcctgggcctcggt

SEQ ID NO: 6046 - DNA, 72 bp, Homo sapiens
ccttggtgagcaagaaaaggcaggttgtgaaatagcggaaaaggcacaggaaatgctctgtgtcttggtggg

SEQ ID NO: 6047 - DNA, 72 bp, Homo sapiens
ttgccaggttaagcaatctgcaaacgttcgcatgacgtttatgcagccgagtcacatccacattctctccct

SEQ ID NO: 6048 - DNA, 72 bp, Homo sapiens
tagctagctgaggaaagaagcattttaaaacagagcgagaccctgtggtagaggatggtgaaaatggggcct

SEQ ID NO: 6049 - DNA, 72 bp, Homo sapiens
ttctctctaaagcaggagtaagacagggttaaccacgtggtgaacattctgaatcacctgtggtttgcctcc

SEQ ID NO: 6050 - DNA, 72 bp, Homo sapiens
tctgcagacagtggggcctttgaaggcaggcggcacgtgttgttttgtatgccacaggcctagcatccactt

SEQ ID NO: 6051 - DNA, 72 bp, Homo sapiens
gagcctctggcctggtggtttccggggagagagcccgaagagcaagggcctcggcagcttcctcagtggggc

SEQ ID NO: 6052 - DNA, 72 bp, Homo sapiens
ctcctggggcctccagggtgcagccctgatcctgccggaggggaggagcccaggcatctgtgcatgaacact

SEQ ID NO: 6053 - DNA, 72 bp, Homo sapiens
caatgacttgctgattactcactgacttgaccgcgcggttcctttcttcacctttgttttccggggggtccg

SEQ ID NO: 6054 - DNA, 72 bp, Homo sapiens
aaccacttacacatggaaccaggaaatacagcaagcgaatctcttcagttacaggcttgttatgcaactctg

SEQ ID NO: 6055 - DNA, 72 bp, Homo sapiens
taccgaggcagctggggcactggaaagcagtgactcgtgtgaagttgctcaacagttaccatggtagggtag

SEQ ID NO: 6056 - DNA, 72 bp, Homo sapiens
aaagtccacacgctgtgtgattccattcataccaacgtccagactaggccagtccgtacagacaggatgaat

SEQ ID NO: 6057 - DNA, 72 bp, Homo sapiens
gggtgggggtgccccggcagcagggccgggaggggcgtggtgggggggcctcggcagcgtggcagaggagga

SEQ ID NO: 6058 - DNA, 72 bp, Homo sapiens
gagatggtggtggtggtttggagggtgttgaggggcgcagagggcaattgggtatgtagatcatcagggtgg

SEQ ID NO: 6059 - DNA, 72 bp, Homo sapiens
agctagtggtcaggaaggagcttagctggaggtggcgactgtttcgtcagaagttagtatctggttgtcatt

SEQ ID NO: 6060 - DNA, 72 bp, Homo sapiens
aacaactgctagccaccatggctgggagggagccacgtgaggacccaggggactggctggggctggggaagc

SEQ ID NO: 6061 - DNA, 72 bp, Homo sapiens
gaagtgattcattgacaggagaattcaactaattacgtgaatctagaaagcatgcagacaagtggaaaccga

SEQ ID NO: 6062 - DNA, 72 bp, Homo sapiens
tccgtttctctttctgacagtcactatctctccttcgctttcggcctccacttctcgctgttcctcgcggca

SEQ ID NO: 6063 - DNA, 72 bp, Homo sapiens
ttaataaggtggcggccactttcccaaccccaaggcggtatttttaagtttctgcagtgggctgtaatttgc

SEQ ID NO: 6064 - DNA, 72 bp, Homo sapiens
tagttgctgctttagcttcttccctccctacatttcgtgactctgcttcctcttcatttttagtctttgggc

SEQ ID NO: 6065 - DNA, 72 bp, Homo sapiens
gagtacatgaccaccctcacaatactcctgcagagcgcacgcgtttatttccccacgccaaaggtgaggcct

SEQ ID NO: 6066 - DNA, 72 bp, Homo sapiens
tctccagagaagtctgaaagcctttggaaagtcaccgaggttggttgtaaagacacctagcatccagtcttc

SEQ ID NO: 6067 - DNA, 72 bp, Homo sapiens
gtacaactgctttttcctattccattctccttgctcgcagcaaagctggctttagctgacaggcaagatttt

SEQ ID NO: 6068 - DNA, 72 bp, Homo sapiens
cccagagtcctaatccaaaaaataggctcaacagccgcaccctgaagccagcagaggagctcaaaggtcaag

SEQ ID NO: 6069 - DNA, 72 bp, Homo sapiens
ggggtagtgcttgcccagggtcatgcctatctggtcggaggtagaaccccagtctctggtctttccttcctc

SEQ ID NO: 6070 - DNA, 72 bp, Homo sapiens
attcattcaatagataatgaactctactgtcagagcgtcgccaagcgctagccttgaaagctatcccctact

SEQ ID NO: 6071 - DNA, 72 bp, Homo sapiens
tgagtgagttgggggcgggggttggggcttctccacggctacttatccaaatgaagtacctgcttcctgtcc

SEQ ID NO: 6072 - DNA, 72 bp, Homo sapiens
ttgtagctcatacatcctttgcactagacagggagcgaatttctgtaacctgggagagtaccaattcacttg

SEQ ID NO: 6073 - DNA, 72 bp, Homo sapiens
gggagggtttttcccaagccgctggcagcagcgagcggagcctcgcccattgaatcagcatgccctcccggc

SEQ ID NO: 6074 - DNA, 72 bp, Homo sapiens
tgcctggtcgagctctttagggccttagcatgcctcgccttgatgggtagcaaaggcacgtgtcggaagcag

SEQ ID NO: 6075 - DNA, 72 bp, Homo sapiens
aggcaggccccagctttgccaggaggaccttcccccgctccccccgccccccatggctctgcactcagggat

SEQ ID NO: 6076 - DNA, 72 bp, Homo sapiens
gtgcaaactcagccctgggcctcagaggagccaggcgtggccaggagagtgggatttggaacggaagtgctt

SEQ ID NO: 6077 - DNA, 72 bp, Homo sapiens
ccactggtaccagcattgacacccatctagaggtccgaggggcagccccagggcagaggagattttgagagc

SEQ ID NO: 6078 - DNA, 72 bp, Homo sapiens
cactacactgggagtcagcggaatgagggcactctcgcctctcttcctccttcctccaattccagaaatgag

SEQ ID NO: 6079 - DNA, 72 bp, Homo sapiens
gaggttaaccctggggggtagaggctgcccagctccggatgtgccagggcctcagggagctgggtgtggcac

SEQ ID NO: 6080 - DNA, 72 bp, Homo sapiens
gaccctattggagagcgagcgggaaaggctgtttgcgaaaatggaggacacggactttgtcggctgggcgct

SEQ ID NO: 6081 - DNA, 72 bp, Homo sapiens
cctctctgtcccccatgtccctgaaattcccggttcgttggccctagtgaggtaatccatctatgacatcac

SEQ ID NO: 6082 - DNA, 72 bp, Homo sapiens
acgagagaaagagaaagggaggcagatgacagctccgtccagcacagaacggggtgtcctgtgaagtggtga

SEQ ID NO: 6083 - DNA, 72 bp, Homo sapiens
ggcgcatagctaaaagccggcgggccatagggccccgcggaggaggccccagcaggcggaccaggaggccga

SEQ ID NO: 6084 - DNA, 72 bp, Homo sapiens
tagaagaaggaaccacgtacgcctaagcagaggcacgcgcaggcatagcatcttctaaggacccgaatgcca

SEQ ID NO: 6085 - DNA, 72 bp, Homo sapiens
cagtttacatgctcattaagtggcattgcaagctgcgactcacactcactgcttgaattattctctcccctt

SEQ ID NO: 6086 - DNA, 72 bp, Homo sapiens
gcagctgagcgtcgagccctacagtcaggaagaggcggagagggcagcgggtatgggatcctatgtgccccc

SEQ ID NO: 6087 - DNA, 72 bp, Homo sapiens
tttcaaaattgttagttaccacgaatgactaagtgcggggatagggtatttttgctggaattgttgcactgc

SEQ ID NO: 6088 - DNA, 72 bp, Homo sapiens
aaatctacacaaatcaggatgcagtctctgcagatcgtatttgatagttggtaaccccaggccaaaaagagt

SEQ ID NO: 6089 - DNA, 72 bp, Homo sapiens
ctgtgggcgacaggaagggccgggagctctgtggccgttggcaaggccaggaacccgggtagtcgagctgaa

SEQ ID NO: 6090 - DNA, 72 bp, Homo sapiens
aagtaaacacacaccctacagtgacccagcaacctcgctcccacgcatttatctcagagtaagaaacagaaa

SEQ ID NO: 6091 - DNA, 72 bp, Homo sapiens
attaaatttaggattccttcttgctgctctctgcccgccgtgcccccagtgcatgcttctgctgctgcactt

SEQ ID NO: 6092 - DNA, 72 bp, Homo sapiens
atctgttgaaaacggaaggctagtaccaagggagacggtagtaaaattatagaaggagctagtgaaaagtaa

SEQ ID NO: 6093 - DNA, 72 bp, Homo sapiens
ggaagggataaatttaggcatggagttttcatttccgtctcttggggctgctgggatctgcacagcaagcat

SEQ ID NO: 6094 - DNA, 72 bp, Homo sapiens
acaggagcaggaagtgatgaggtggggagctcagccgagggctgcacaaagaccttcctggcctgccccaga

SEQ ID NO: 6095 - DNA, 72 bp, Homo sapiens
taggaaaactagaggaagagcattccaggcagaggcgagagccagtgcaaaggctctgaagtgctgcctgtc

SEQ ID NO: 6096 - DNA, 72 bp, Homo sapiens
caccagcgaaggggagggccccggagaccacgagacggatgacgaaccagcaccaacgaaggggagggcccc

SEQ ID NO: 6097 - DNA, 72 bp, Homo sapiens
tttatgtttctaccttgttaactaagcttccactacggttcataaatctccaatatcgtgaattaaagaaac

SEQ ID NO: 6098 - DNA, 72 bp, Homo sapiens
ccacgctaatgaaagccaggtctttaagttcaccccgcctctggactattagtttctcctttgcgccctgcg

SEQ ID NO: 6099 - DNA, 72 bp, Homo sapiens
gagattgtgtaaatcctccaagaaatgggaagccccgtgttagtgtttgccttctccttttgccccaggatg

SEQ ID NO: 6100 - DNA, 72 bp, Homo sapiens
agactggatctaccagtgacttgctgaataaccttcggtgattcctttctcttcttgggtctcactgtattt

SEQ ID NO: 6101 - DNA, 72 bp, Homo sapiens
aaaattacgcaatacataaaccaaacggcagactccggacagcggactgcggtgaaatgccagaaaattacg

SEQ ID NO: 6102 - DNA, 72 bp, Homo sapiens
gccatgtggctgccactggtgttccccgcctggcccggcccacagcagccagtgctcattcctgcacacact

SEQ ID NO: 6103 - DNA, 72 bp, Homo sapiens
ttttttttttcacccaggctggtgtgggttggcagcgtatgagttcatgggagcatgcaggtgaagaggggt

SEQ ID NO: 6104 - DNA, 72 bp, Homo sapiens
gaatcacggggcagcggtcagaccatctgttaatccggaagctctcatttcatggatataggctgacagtct

SEQ ID NO: 6105 - DNA, 72 bp, Homo sapiens
ctttgtggtccccagagaagtcttaggcccggcaccgcctcctcctcctcaaagttaatccctaaatttcac

SEQ ID NO: 6106 - DNA, 72 bp, Homo sapiens
aacagaggctcacccacagcagacattcctgcttccggatcctcagcggcctctcccagggggaggaggaag

SEQ ID NO: 6107 - DNA, 72 bp, Homo sapiens
gctcatcctttgtggttctccttgcacaagttctgcgagccgtgtgtgggaggcccctgtcgtggtctgagg

SEQ ID NO: 6108 - DNA, 72 bp, Homo sapiens
tcggtgtggaaacaccactccacaagcagcctccacgctccccacttcattccaaaaacgatttcacctggc

SEQ ID NO: 6109 - DNA, 72 bp, Homo sapiens
gcttggcagctgttgcagaagggcagggagcctgccgtctcagatgagggcctcggctccaagttccattgt

SEQ ID NO: 6110 - DNA, 72 bp, Homo sapiens
tgaagtgtcaagaaaaccacagttcatctgttatccgtccatctctgttgaaatattagtttactgccatat

SEQ ID NO: 6111 - DNA, 72 bp, Homo sapiens
tgcctgaggtgcccggggaggctgcagcaggtcagcgagtgagtggaggggaagtcaagatgctaactgctt

SEQ ID NO: 6112 - DNA, 72 bp, Homo sapiens
ctgtgccgttctattgacatctcgtgggtcgaggccggggatgttgctaaacatcctgcaatgcacgggaca

SEQ ID NO: 6113 - DNA, 72 bp, Homo sapiens
actttttgtgcagagaccacaatgcttatgaaatacgaaatttttcctgtggaagatatcaggtcggtgcaa

SEQ ID NO: 6114 - DNA, 72 bp, Homo sapiens
tcaggtgacagtccctctgagagtgtcacttcctccgcccacaggggcgcagacaccttctattttacacgt

SEQ ID NO: 6115 - DNA, 72 bp, Homo sapiens
agaagtgttttggtctttatttcgaagtttaggggcgattttgtgaccacagatatgttgtaggaacttcac

SEQ ID NO: 6116 - DNA, 72 bp, Homo sapiens
gaggttcctgaggtcacagtgttttccaagtctcccgtgacactgggtcagcccaacaccctcatttgtctt

SEQ ID NO: 6117 - DNA, 72 bp, Homo sapiens
agctaagtaactgagctggcccaaaaagaaaccagcgtggagaacatgatggcacttgtgggtcttcttgtg

SEQ ID NO: 6118 - DNA, 72 bp, Homo sapiens
ttgaggtcagaatctccctttttcttccagttatccgcgccgctgccccacgcctagcggcttggatctgca

SEQ ID NO: 6119 - DNA, 72 bp, Homo sapiens
caaacggaacccaaagactcagtgaggaaagcaggcgggctgggctgagactcacagctgcagcggccgtgg

SEQ ID NO: 6120 - DNA, 72 bp, Homo sapiens
aatgggattgcgagcgtcagtgttctctgctgcgtcgccgacctgggcgcgctcgaaggcaagtcttggcac

SEQ ID NO: 6121 - DNA, 72 bp, Homo sapiens
cacctttgaaggggtgcccatgacccacagccccacggatcccaggccagccaaggcagaagaaggaaagaa

SEQ ID NO: 6122 - DNA, 72 bp, Homo sapiens
ccttccttcgtgaaagaggacaagatcagggctcacgtgactggggccgctgtgactctgagcctctgcgtt

SEQ ID NO: 6123 - DNA, 72 bp, Homo sapiens
ggtgagcgtgggggcagcgtcccgcttgttggtcccgcttggataacgcagaagcgtggaagcaggtccggg

SEQ ID NO: 6124 - DNA, 72 bp, Homo sapiens
gggcaggtaaggagcgctggtattgggggcgcaggcgccggggtgagaggcctgatagcagacggctgcagc

SEQ ID NO: 6125 - DNA, 72 bp, Homo sapiens
ggggaactcaggtgagaggggtcctggggtggagacggaggcagattggggcgtctgcctgtacattcactc

SEQ ID NO: 6126 - DNA, 72 bp, Homo sapiens
ctgtaagctctaggctgagtgcatggaaactgttacgcttctcattttatgtgatctcctaattggtatgta

SEQ ID NO: 6127 - DNA, 72 bp, Homo sapiens
agtgagctcagtgcgtgccttccccattgtcctggcgttccatgcaggctgggagacgcgggtgacagcctc

SEQ ID NO: 6128 - DNA, 72 bp, Homo sapiens
aggtgcctttttccatctctctctagcacctagctcggtacttgttgatccaatgattaacaaggcttgaag

SEQ ID NO: 6129 - DNA, 72 bp, Homo sapiens
cagctgctgagaatgacacgcgactctgatgaaagcgatacagcttagccggtctggctgttcaccgtcctg

SEQ ID NO: 6130 - DNA, 72 bp, Homo sapiens
cccgggatggaagggactgatacccagttaatgggcgtggagcctgagcccctgagggtcgtcgctaacggg

SEQ ID NO: 6131 - DNA, 72 bp, Homo sapiens
tttggtttaattgattcaaaaacaccagaggaccacgaccaggacaccatgagcccccattcctacaccagt

SEQ ID NO: 6132 - DNA, 72 bp, Homo sapiens
ttgcttctgaaatgtgcccagatattaacatgttacgtataacaatcagggccagttgtcttactaacatcc

SEQ ID NO: 6133 - DNA, 72 bp, Homo sapiens
aaatgtcccagactgttatgggtttggcccccacacgcccttttaaaacaggctttaggcttgcctgggaag

SEQ ID NO: 6134 - DNA, 72 bp, Homo sapiens
cctgctggcatatatgatgacttagcttttttccccgacagatcgactatgttgatctaacttttctaagcc

SEQ ID NO: 6135 - DNA, 72 bp, Homo sapiens
aaataatttagcaattactcaatctcacatgtctgcggcgtgacccctcctgcttctttaaatatcagctgg

SEQ ID NO: 6136 - DNA, 72 bp, Homo sapiens
acagccggagaacacaggcttcgcacagcttggtccggctggaatgaattctttcctgccactgagcacgac

SEQ ID NO: 6137 - DNA, 72 bp, Homo sapiens
agccacaaacccatttaccctgtctgacctgcctccgccaccaggacccagtctcagtgaaatgggaaaggt

SEQ ID NO: 6138 - DNA, 72 bp, Homo sapiens
acggtttgggcatcccacagatgccccttgaggctcgcttgacagcccgcctggactcgctcatctgcagca

SEQ ID NO: 6139 - DNA, 72 bp, Homo sapiens
gcctcctgagtagctgggactacagctgggttacacgcctgtaacccagttctgtgggagatcgcttgagcc

SEQ ID NO: 6140 - DNA, 72 bp, Homo sapiens
cagcgaggctcgggtatggagctgaagtctattttcgtgctcctctcagttccctatctttttctgccttaa

SEQ ID NO: 6141 - DNA, 72 bp, Homo sapiens
tttactgtctcaagcgtcttctctccctggtcgcacgcgctgtgagcttattgttctgggcgttccccaccc

SEQ ID NO: 6142 - DNA, 72 bp, Homo sapiens
acagatctgactcagcagctgccttcctcctttcacgtcattgcatcgggcacatgctggtcatgtgtttct

SEQ ID NO: 6143 - DNA, 72 bp, Homo sapiens
tcacatttatctaactgtatgcccgtgtctagttacgtgccttcttagaggttccagacgctaatcttgaga

SEQ ID NO: 6144 - DNA, 72 bp, Homo sapiens
caacatggtgaaaccctgtctctactaggtgggcacggtggggcatgtctataatcccagctacatggaagg

SEQ ID NO: 6145 - DNA, 72 bp, Homo sapiens
gtagaagatgtcagttattttatatattgataacacgttgaaatactatttggatatgttgggttaagtaaa

SEQ ID NO: 6146 - DNA, 72 bp, Homo sapiens
cagaatgggtgctggatggccccagccgcgcggcccgtgcggaagaccctccccttccttgcagccctcttg

SEQ ID NO: 6147 - DNA, 72 bp, Homo sapiens
tggctttctgggtctcatgtggtgaggagcaaacacgacactctctgaggaaacgcggtgagaagcaagagc

SEQ ID NO: 6148 - DNA, 72 bp, Homo sapiens
gccatttcgggaggaatctggtctcggctggggtccggccggcaccgtgaacaccacgtgaacaccacgtcg

SEQ ID NO: 6149 - DNA, 72 bp, Homo sapiens
acccaaccttgattacagtgtccagaatgctggagcgtaggtgaaaggacaaaagccagacacatttcaaca

SEQ ID NO: 6150 - DNA, 72 bp, Homo sapiens
tgcttctgctttaccctacccacctgcccacccggcgcgtctgcctcgtcctggcaggacaagccctgagcg

SEQ ID NO: 6151 - DNA, 72 bp, Homo sapiens
acatggatggacacctgatacctggcagtctgcatcgagacattgattttgttttttgagatggggcctcac

SEQ ID NO: 6152 - DNA, 72 bp, Homo sapiens
gcagaaggcctgaactcagcacaagtgcaagccatcgcctcctatcaaaggtgcgccggggggtgggggagg

SEQ ID NO: 6153 - DNA, 72 bp, Homo sapiens
gtgcccgtgttctggggtagcaccgtgaaggcccgcgtggaacatggtttttatttagagtaaaaacagctc

SEQ ID NO: 6154 - DNA, 72 bp, Homo sapiens
ttagtagttccctcataatgaattgccacattgaacgaggaagttttctgtgttggttttatgttttgctgt

SEQ ID NO: 6155 - DNA, 72 bp, Homo sapiens
tctcaaaacattcagaggacactggtgggatttcacgagccctgatttccccagctccttccccatatcccc

SEQ ID NO: 6156 - DNA, 72 bp, Homo sapiens
agttcgttctcaaaaaacagccaacgcggcagctccgggtgaccaggattgcaacaccaaatgtgtttgttc

SEQ ID NO: 6157 - DNA, 72 bp, Homo sapiens
atatatttattctaattctgataataaccctctgacgtaggactgatgcacttcatttccagatgaggaaac

SEQ ID NO: 6158 - DNA, 72 bp, Homo sapiens
atctggagctctctcctttccctgtcagtaaccctcgggcccccctggggccactgaaagttcccccagcca

SEQ ID NO: 6159 - DNA, 72 bp, Homo sapiens
tcgtgtatgccttccaggatcccaattctgggtaacggtgcagaggactgaggccgccgagcgctgtggcct

SEQ ID NO: 6160 - DNA, 72 bp, Homo sapiens
tgtggagtggaatggggaaggagagcattttgaaacgcaaggtcagaaaggttaaaggaagcaagtatatga

SEQ ID NO: 6161 - DNA, 72 bp, Homo sapiens
tgcccccaagcccggctgtgttaagcacttcgcgtcgatataaagcattggtatttgacattttaacagtaa

SEQ ID NO: 6162 - DNA, 72 bp, Homo sapiens
ccccctgtttctcccaaagacttctttgaaatacacgatttcaaatacgtttctggatcctaaaacttttta

SEQ ID NO: 6163 - DNA, 72 bp, Homo sapiens
tcataactaatctttgctagtttagaagttagaaacgtggcatctcacggttgcttttctttaccgactggt

SEQ ID NO: 6164 - DNA, 72 bp, Homo sapiens
aaccaagcaacaaatgcagtctcagctgttgctaacgttattcacaggagtgacaaactgaatgaatcttag

SEQ ID NO: 6165 - DNA, 72 bp, Homo sapiens
gagaaacaggcccctattatcgctcccacttttgccgaagaggcttaatacttagattatgcagcttcccca

SEQ ID NO: 6166 - DNA, 72 bp, Homo sapiens
ggattgtcggcagtttctcctcctgttcctctgcccggctctttcgtctccctccagcgcaaagcaggggac

SEQ ID NO: 6167 - DNA, 72 bp, Homo sapiens
cggaagtgaggctaacagaagcccacactgaaggccgcgttccttcgtggcgccgtcccatgccaaagctgc

SEQ ID NO: 6168 - DNA, 72 bp, Homo sapiens
tcttagctgtgcctgcatccgggcctgcctgtgggcgtgggtcacacgggataatgttacctgcgtgctgtg

SEQ ID NO: 6169 - DNA, 72 bp, Homo sapiens
atcccttgagagataaagtgactcggccaaggatacgtggcaaattagttatggggtagattagaatcctag

SEQ ID NO: 6170 - DNA, 72 bp, Homo sapiens
gagtccttgcaaacccacgctggctgggctaactccgcttcccttctccttcccccgactcctgcaacagct

SEQ ID NO: 6171 - DNA, 72 bp, Homo sapiens
aagatggtccacggggaagcgcgcgggctgggcggcggggaggaaggagttaaagatcctggattggctctt

SEQ ID NO: 6172 - DNA, 72 bp, Homo sapiens
gccaacagtttcatttcctggtgagggctctcttccgggcctgcagacggctgtcttctcactgtgtcctca

SEQ ID NO: 6173 - DNA, 72 bp, Homo sapiens
ctaagctgggtgtatgtactgatgtactgaatgggcgaccatttccttccagaaaggctggagtcagccctc

SEQ ID NO: 6174 - DNA, 72 bp, Homo sapiens
ggttatgcaactatctgagctatttctctggctgtcgccccaaagaggaacagcccagaaccttatctgcct

SEQ ID NO: 6175 - DNA, 72 bp, Homo sapiens
cagtcctggcgttattacccaacaactccatggcacggagccacttacacccagtgctgggaggaggtgccc

SEQ ID NO: 6176 - DNA, 72 bp, Homo sapiens
tattggtctccttttctagaacttaccacgtacttcgtgcatattaatacgtgactcccattggcagctgct

SEQ ID NO: 6177 - DNA, 72 bp, Homo sapiens
caaactcaaagaaagaggagggaaggacattttgacggttactaaatgtaattatttgagccatgaagtgtt

SEQ ID NO: 6178 - DNA, 72 bp, Homo sapiens
acaccggaaacgtcctgaggtgcgggacgggctgccgcctgcctatctctcagaaattaaccaccccgctac

SEQ ID NO: 6179 - DNA, 72 bp, Homo sapiens
taagttccatcaagggagccttccgttctctgtagcgacaagaaacaaggcaagttatgatcacacctctca

SEQ ID NO: 6180 - DNA, 72 bp, Homo sapiens
aggtctcacttatttcctgtttccacccagtgggtcggggtggacccagaacggccatatcctgactggggc

SEQ ID NO: 6181 - DNA, 72 bp, Homo sapiens
attgatatttttgaagagcacagcattagtgatttcgtcgaacgtccctcagttaggatttgttggatgttt

SEQ ID NO: 6182 - DNA, 72 bp, Homo sapiens
tccaggctaggagtatctgcccctgaagtcacacccgtctgccaagcagccacccacgccttcctgctctga

SEQ ID NO: 6183 - DNA, 72 bp, Homo sapiens
cactatatgcctggggacctcaaaatgggagccagcgatagaggtaattcaatgcccttcccactgtgacta

SEQ ID NO: 6184 - DNA, 72 bp, Homo sapiens
aacccaagtgaaaatgtaatttttcactcactcgccgtccttgctttaattagattaaatgcatctgtttcc

SEQ ID NO: 6185 - DNA, 72 bp, Homo sapiens
gcgcgcaccgcggacacgccgggtactggcctgcccggctctcacctgcccaggcccaagcagtcgctgtcc

SEQ ID NO: 6186 - DNA, 72 bp, Homo sapiens
accagtagttctgacaggcaaggatatcctgaccacgccaccacattcacacttcagaggtgctgcaccggg

SEQ ID NO: 6187 - DNA, 72 bp, Homo sapiens
ccagatccacagaaccccaatcttggatggctactcgtgtccctccaatctccaggctctcctccctctggt

SEQ ID NO: 6188 - DNA, 72 bp, Homo sapiens
gcagtgccagccctctggcactgtgctcgatttctcgctgggccttagctgccttcccgtggggcagggctc

SEQ ID NO: 6189 - DNA, 72 bp, Homo sapiens
gaccatagtgaggatgagaaagagacagatgaggacgatgaggcttttggggaagctctgcagagcccagca

SEQ ID NO: 6190 - DNA, 72 bp, Homo sapiens
ctgtttccccggccttgcccccgcccgccccgtgccgtggacatctgggcccactcatcgcccctccaggcc

SEQ ID NO: 6191 - DNA, 72 bp, Homo sapiens
agtctgtgatcccacagtaatctctgtcttatcaccgaggctggcataactttttagcagctggcctggctg

SEQ ID NO: 6192 - DNA, 72 bp, Homo sapiens
acctagctgatgctgactcatgctggaggttcctgcggagtgagcatcagagctcatgagctcatctcccta

SEQ ID NO: 6193 - DNA, 72 bp, Homo sapiens
taacaaggcaagaggtggtgattgagcaagagccccgggtgtgtgtggattctaacctcatcagccactagc

SEQ ID NO: 6194 - DNA, 72 bp, Homo sapiens
agttcaaaagaaagtgtatagtcctctaacttcttcgaacttttaggaagctcagtgatggtgtcactggtt

SEQ ID NO: 6195 - DNA, 72 bp, Homo sapiens
tggaagccaatccaggcgcctcccttgtgtagggacggaaaaagtatgcccctgccccgagctggagggaga

SEQ ID NO: 6196 - DNA, 72 bp, Homo sapiens
atcaccacctttaaccgtgacaacaagctgggcagcgtttactccctcctgaatatgaggaagctgaggttc

SEQ ID NO: 6197 - DNA, 72 bp, Homo sapiens
ggcggacaggtcgtttgtctggaggatgatcgccccgggacagaggatccgaatcttctgctggctcgtggc

SEQ ID NO: 6198 - DNA, 72 bp, Homo sapiens
ggtcattaagtctggacagctaggcaggagctagacgtgcaagaaatcatattgagttagaggaactactgt

SEQ ID NO: 6199 - DNA, 72 bp, Homo sapiens
cacagctgccagctctttttcccacttaacggattcgggaaccatctcaaaggaagctgcaagagggaggga

SEQ ID NO: 6200 - DNA, 72 bp, Homo sapiens
catgaccacccggaggttctgcaaggccacgtcggcgttctgcttcaccactgtcaggctggcgccctggcc

SEQ ID NO: 6201 - DNA, 72 bp, Homo sapiens
accgctacggccaccaccgccacccgccgaggagccgcccaagcccatttgccgccacagccaaactttgcg

SEQ ID NO: 6202 - DNA, 72 bp, Homo sapiens
ccaccatccctgtcaccgggcaacgggaggccaggcgctatggctcctcagccaaggccttctctgcctagg

SEQ ID NO: 6203 - DNA, 72 bp, Homo sapiens
ggctcaaaatacactgaccagtccaagacaacgcgcgcccccacaaagcaccttccccgtccccatttatgc

SEQ ID NO: 6204 - DNA, 72 bp, Homo sapiens
gaggaagctagattagatggcaatgggctagggagcgtggtgggatcttgtggccattgagaaatccccggg

SEQ ID NO: 6205 - DNA, 72 bp, Homo sapiens
acatagaattacagagttcacgttttagtcccagacgggagactgaggctcgagactgaggaaggcatctgc

SEQ ID NO: 6206 - DNA, 72 bp, Homo sapiens
ctggaaacacagcagggttgatcaccacccatttccgttccccttcttcctgcccctccctccttgaagtcg

SEQ ID NO: 6207 - DNA, 72 bp, Homo sapiens
ttaagacaggaaaaataacagcatgtttgtatgctcgtgggggtgacccaagagggagagaaaaattgattc

SEQ ID NO: 6208 - DNA, 72 bp, Homo sapiens
gggcatcaagccaagtcatctgatgagagtgactccggttggggggtgggggcgtgtgggaggccgagcctg

SEQ ID NO: 6209 - DNA, 72 bp, Homo sapiens
gagcagccatgtgatgaggtgtgtagggggcacgccgagtgtagtaagttaatgtttccagcagggtgcggg

SEQ ID NO: 6210 - DNA, 72 bp, Homo sapiens
tagtgcccattttacagttgaggacatgagtagaacgcgacctcagcctgtgcttccgagttccttcattcc

SEQ ID NO: 6211 - DNA, 72 bp, Homo sapiens
aaccaaaatcatttaattggaagatatcctaccttcgctgctatggcttcttgtctaagaacaaacaacagt

SEQ ID NO: 6212 - DNA, 72 bp, Homo sapiens
catcatactccatttgcatatgacaaatatatacacgtagacaccattttagcagcttttgcagcatgcatg

SEQ ID NO: 6213 - DNA, 72 bp, Homo sapiens
caagggtaataaataccagggacacttttgcaatgcgtgcctgtcagctgagtgctggacaaacatttttac

SEQ ID NO: 6214 - DNA, 72 bp, Homo sapiens
ctgtcaccgtctgtttgccaagctgacagggagcacgtagtggataaaaactgtttcctctgggtggttagg

SEQ ID NO: 6215 - DNA, 72 bp, Homo sapiens
gctgcccctgagcgccggggccacggggctaggctcgtggagaggacgcccctgccccagacccggccccgg

SEQ ID NO: 6216 - DNA, 72 bp, Homo sapiens
cctcaaattcagtccatgcttcttgttttgggtctcggggctgggataaggcgggctgaccaccgcggggca

SEQ ID NO: 6217 - DNA, 72 bp, Homo sapiens
gctctggatccaatcagtgttgccaaagattggatcgtatcttctctagaagctttttgtaagtttcttatg

SEQ ID NO: 6218 - DNA, 72 bp, Homo sapiens
gagtgttccttcttgtcactcccacatactggctacggtgagaaatccaatgtggtttagtgaaaggatctt

SEQ ID NO: 6219 - DNA, 72 bp, Homo sapiens
gatgctggataggcagaagctgcagatgtccattacagtcaccatgctcaccattcagctgaagcaaagcag

SEQ ID NO: 6220 - DNA, 72 bp, Homo sapiens
ctaagaagagtcacttccatcaggactgtgaagatcgaatgagataataacatttaagcacttcgggcagcc

SEQ ID NO: 6221 - DNA, 72 bp, Homo sapiens
cctctttcacttgctgatctgtgggcgctcccacccgtgtgccagcgtgacggctcggggtgtccgctcccc

SEQ ID NO: 6222 - DNA, 72 bp, Homo sapiens
gcagggccatcgcataatgtagagcttggtccaggcgtggcagagaacttcttaagtgacacaaagcaaatg

SEQ ID NO: 6223 - DNA, 72 bp, Homo sapiens
cgtgaaggtgatgctgtatttggccagggctctggcggaacagatggactctcccccaagaggctggccggc

SEQ ID NO: 6224 - DNA, 72 bp, Homo sapiens
gtgggaagattgtccgccattttaggaagtaacagcgtctggtgacaactgctgatgaaagaaatgaggtgt

SEQ ID NO: 6225 - DNA, 72 bp, Homo sapiens
aggcctggctgtgctgacgggaattgaaaggacctcgtggcttaggcaggcgggggagccccccggctggtc

SEQ ID NO: 6226 - DNA, 72 bp, Homo sapiens
gctgacggctggttgaatgctgtgtcagcgacgagcgaccctgacttcccacacaccggccaggccagggac

SEQ ID NO: 6227 - DNA, 72 bp, Homo sapiens
aaatgggagggagagagtagaggcagagatgaaaacgccttaccctgttaaccagaacagccattgcatatt

SEQ ID NO: 6228 - DNA, 72 bp, Homo sapiens
gtcaagtctgcaaggctcccagggtgaggcccttccggggagttgccatatgaagcattttagccttgctta

SEQ ID NO: 6229 - DNA, 72 bp, Homo sapiens
gagagtgcagctgcaccgaggtgatgccctgggcccgggaggtggaatggctcttgcactttggcaggggtg

SEQ ID NO: 6230 - DNA, 72 bp, Homo sapiens
tggcaagtctgtggtgctgctctttggggccacctcgttctttgcctttccctccccttagcgatgtgtccc

SEQ ID NO: 6231 - DNA, 72 bp, Homo sapiens
acttaccatgtgccactttggttcaaggcaggaaacgaaccctactttctcagtgagctgcaacttcagagc

SEQ ID NO: 6232 - DNA, 72 bp, Homo sapiens
tgggactgctgggctgggaacttagctaagcagtgcggaggctgaaccccaccatctctgggatccgcagca

SEQ ID NO: 6233 - DNA, 72 bp, Homo sapiens
gagcgtgactctgtctcaaaaaaaaaaaaaggtgccgttagacttggctcaagctgggctgcggtaaacttt

SEQ ID NO: 6234 - DNA, 72 bp, Homo sapiens
tggcagcagcctggctcatggccaagcacgggccacgacagggcagggagcgcagcccaggccgggaggccg

SEQ ID NO: 6235 - DNA, 72 bp, Homo sapiens
agaaagagcgggcagctctgccctggggcgcccgccgcctggaccctgattcctggcgctggggacccagat

SEQ ID NO: 6236 - DNA, 72 bp, Homo sapiens
cgtggatggacctgcagggttgcctcccctcatgtcgcccccagccgcacctgaaggccccctcagttggcc

SEQ ID NO: 6237 - DNA, 72 bp, Homo sapiens
ttctggtatgcaagtccccagcagcggccccgtgacggtctatgagctggggacactgctcttggcagtaca

SEQ ID NO: 6238 - DNA, 72 bp, Homo sapiens
tcatgtacatacaaagagagcactttctcaaccaacggacctccctgaattattcaaagtaccttccattct

SEQ ID NO: 6239 - DNA, 72 bp, Homo sapiens
gctgagacactcttttatccgattggctttccttacgtgaaaggctttcgtaatctcctggttcatgaaggc

SEQ ID NO: 6240 - DNA, 72 bp, Homo sapiens
cctctagcggtaggcgaactggggagtgtgggcggcgggggaaggcgaggccctggaggacctgttgttttt

SEQ ID NO: 6241 - DNA, 72 bp, Homo sapiens
ccacgaactcgttgttctctagggccacctcgagccggtcctcgttgtccagcaggcccaggcccttgcacc

SEQ ID NO: 6242 - DNA, 72 bp, Homo sapiens
gcagccagtacctgggcactctgcttggtgcagagcgggcctttggatgagtgattaccacaccatctggat

SEQ ID NO: 6243 - DNA, 72 bp, Homo sapiens
gggcctcctcggggccgggactcggcgccgaccgccgcctgaccctgtcaccccgcagcccctgccgcggcg

SEQ ID NO: 6244 - DNA, 72 bp, Homo sapiens
tggatttgggagtaaccacctggccagccaaacaacgatcttttttttgagacggagtttcactcttgttgc

SEQ ID NO: 6245 - DNA, 72 bp, Homo sapiens
tgcaggaagttggcctgccctgagaggctctgaggcgctcacttcacacttgggaggatccaggccggggca

SEQ ID NO: 6246 - DNA, 72 bp, Homo sapiens
gggggagggtcggggggacttccagtagctgagtccgtttttttccactgagagcttccgcatcctgtgtga

SEQ ID NO: 6247 - DNA, 72 bp, Homo sapiens
gtccagcccggtgggaaaaagtggctgtttgaaaacgggcctgattctgtgtcccgggcgcccccagctgac

SEQ ID NO: 6248 - DNA, 72 bp, Homo sapiens
ctggatggcgtgagcgagccactgtccggagagctcgcacttcacctcccagcctccgtactgcttggcttc

SEQ ID NO: 6249 - DNA, 72 bp, Homo sapiens
ctcgtggccttggcgagcagggcgtggtgcagtgtcgtgagaacactttcaggacctgccgcccagcttggg

SEQ ID NO: 6250 - DNA, 72 bp, Homo sapiens
ggtcggcaggctgaggtatgagaactgcttgaacgcgggaggtggggttgcagtgagccaagattgcgccat

SEQ ID NO: 6251 - DNA, 72 bp, Homo sapiens
ttagggaaggtgcctttgcctgtttctgccctaagcggagctgtggatgaggaggggcgctaatgatgaaac

SEQ ID NO: 6252 - DNA, 72 bp, Homo sapiens
ccctagtccccagcacaatgctaagttgcagtgcccgactgttctgctcagaactggaacagatgggtcctt

SEQ ID NO: 6253 - DNA, 72 bp, Homo sapiens
catagccaagagcagctcatcttccctggagaggacgggctgcccacttgcacagcccgggggcctcctgcc

SEQ ID NO: 6254 - DNA, 72 bp, Homo sapiens
aagatgacagcccaggagttcatttgcatgcattccgtccaccagtggggccccagcctctaagagagtgac

SEQ ID NO: 6255 - DNA, 72 bp, Homo sapiens
ccctttagctcatcaccctctgctctggctttccccgagttggtacagagctgatgccgttggtatttttaa

SEQ ID NO: 6256 - DNA, 72 bp, Homo sapiens
ggtgaggcccagctcccctcagttcccagccttcccggaaccccttgcctaacatcctgtgtggtaatcatg

SEQ ID NO: 6257 - DNA, 72 bp, Homo sapiens
gaatatgctttatttatggcattttttggcttacccgcccagtaaatgcaaccacaagagatgataagaatg

SEQ ID NO: 6258 - DNA, 72 bp, Homo sapiens
tctgggcctcagagacaccagaacacccagcggcccgcgtccagggagtctagaaccttgggctcccgcgca

SEQ ID NO: 6259 - DNA, 72 bp, Homo sapiens
acgtcgacgtgacgcagcaggatgccacccctttccgttccatgacgtcagcagggcacatgtttccgtgtt

SEQ ID NO: 6260 - DNA, 72 bp, Homo sapiens
cttgcttagatgttccaaatttagaaagcttaaggcggcctacagaaaaaggaaaaaaggccacaaaagttc

SEQ ID NO: 6261 - DNA, 72 bp, Homo sapiens
atgctccatcggctcccccggggatttcagggccacgtgactctccctccccaagctgtcacttaggatcag

SEQ ID NO: 6262 - DNA, 72 bp, Homo sapiens
taacccgggtcagtgacgcccatgatagttaagaacgactgttctaaatctgcctccatctgtcatccaacc

SEQ ID NO: 6263 - DNA, 72 bp, Homo sapiens
acttgacctactcttccaccttgttcatgtctttgcgccttatgggactgccagaaccctgcagatgccagg

SEQ ID NO: 6264 - DNA, 72 bp, Homo sapiens
gtctggatcctgggggcagcgactgtgttctagggcgagagccaccctcgccaggggtgtaggcaggcgaga

SEQ ID NO: 6265 - DNA, 72 bp, Homo sapiens
cagaaaagctagaggaaccttttcctcatccccttcgaaggttagaaggtttcagaagcctggaaaagaaga

SEQ ID NO: 6266 - DNA, 72 bp, Homo sapiens
catccagaattgtggaagttgcttatggcgacctccggaatgagagtgtggaaaggggaagcgtcctgggga

SEQ ID NO: 6267 - DNA, 72 bp, Homo sapiens
tacactgcactctgaccctgtagtacagcaataaccgtctaataaagagcctacccccaactccttctgcac

SEQ ID NO: 6268 - DNA, 72 bp, Homo sapiens
gaacacaagcctcagcgaccagtaagttgtcccaacgccccttgagtacaaaacactaatttcactaactaa

SEQ ID NO: 6269 - DNA, 72 bp, Homo sapiens
cgatccttcatggataggcagctggacacagaggtcgtgggtgagctggaggagcaggcccggatgtgaggc

SEQ ID NO: 6270 - DNA, 72 bp, Homo sapiens
caggccgggggtgtccgggaggtctttgggcatcgcggtctggggttgggacgtgtaagcgcctgggagagc

SEQ ID NO: 6271 - DNA, 72 bp, Homo sapiens
agctgggtataaattgcacataaccatctccccaacgtagctacataaagagaccagccttctgtcctgaaa

SEQ ID NO: 6272 - DNA, 72 bp, Homo sapiens
tgagctgctgccctcaggaagcactgtacatcacacgcctgttctctccacttctcctttccttccctggct

SEQ ID NO: 6273 - DNA, 72 bp, Homo sapiens
tcctgccggccggaagcaggagacccaagtccaggcgaacgtgacgtccttgtcctcgtgctgtgcctgggg

SEQ ID NO: 6274 - DNA, 72 bp, Homo sapiens
gtggagacacatggcaatctttgaggtcaggcagacggagaaaagccctaggcaaggtagaatttgtgcaac

SEQ ID NO: 6275 - DNA, 72 bp, Homo sapiens
ggctgtgctgccaatggcacagggtatttaattgccggaagaaggaaagttcttatgtctgggacatgccca

SEQ ID NO: 6276 - DNA, 72 bp, Homo sapiens
gagcaatgataaaaatcctccagctggagtggagtcgcctgaccgtcactggagcctccagccctgtttcct

SEQ ID NO: 6277 - DNA, 72 bp, Homo sapiens
gggggctgtccaaggtctagtccagccccctctgccgaggaggacgtgctctgaaactcaaccaatttcccc

SEQ ID NO: 6278 - DNA, 72 bp, Homo sapiens
tgccgcagccctgggacacagtcgggcaccttccccggacccccaggccttggctgtgcctcaagtcagaga

SEQ ID NO: 6279 - DNA, 72 bp, Homo sapiens
tgactcactgtgtagcggcgtcttctggcggtggacgaggccgggcgcacgattttccccgtgggtgagagt

SEQ ID NO: 6280 - DNA, 72 bp, Homo sapiens
cacagcacgccctcaggccgtgtcgaaaggaaggacggcaaaggtcccttactgaaccttttaagagagcct

SEQ ID NO: 6281 - DNA, 72 bp, Homo sapiens
tgatggcttcttcaactccaaggtggcattgttcgcggctgtcggtgccggttgcgtcatcttcctgctcat

SEQ ID NO: 6282 - DNA, 72 bp, Homo sapiens
agagcaggtgactgttcagcagcccctagagttcccgacaccctctgacgggatgtctgagctgtcgctggc

SEQ ID NO: 6283 - DNA, 72 bp, Homo sapiens
tgtcctctgggtgtgctgtactgagctcagggccacgtcttcagatccctacaactctttgcaactcttact

SEQ ID NO: 6284 - DNA, 72 bp, Homo sapiens
gggagatggtgttccagaagtcagagctctactctcgctttgaaatgctgaatctctaggaagttactcctt

SEQ ID NO: 6285 - DNA, 72 bp, Homo sapiens
gaatggcagcaacaacacgcttcctggctcctacccgaatctcaccgagtcatgctccttgtgaaatgggtc

SEQ ID NO: 6286 - DNA, 72 bp, Homo sapiens
aaaatagaatatgatcatttattcattcattcatccgttcaagaagcactaagtggccttggcttttactgc

SEQ ID NO: 6287 - DNA, 72 bp, Homo sapiens
tccccgggaaagccccgccccccagaatctggttacgtgaggctcagccttctgatgcccggtggtgaactt

SEQ ID NO: 6288 - DNA, 72 bp, Homo sapiens
accctcacctgcagcaataccactcattctggcatcgtgagcagcgcttagaagcctctgcactgcagtaag

SEQ ID NO: 6289 - DNA, 72 bp, Homo sapiens
gcgatgcagagccgggtacccagagctgggggaaccggcagaaccttctggagagagagaaccagacagaag

SEQ ID NO: 6290 - DNA, 72 bp, Homo sapiens
agttgaagcaagaaggctgcttgagcccaggagatcgagactgcaagtgagatgtcttcaagccatttcact

SEQ ID NO: 6291 - DNA, 72 bp, Homo sapiens
gcaattagagaaaaccaggctgagctttcgtcatgcgagatgtaatgccttgaagccaaatgatgcagtatt

SEQ ID NO: 6292 - DNA, 72 bp, Homo sapiens
gtgctcaagcagcgatcctccctcctcagccttcccggtagctgggaactacaggtgcccgccacagcgccc

SEQ ID NO: 6293 - DNA, 72 bp, Homo sapiens
agttaatggtacatggtttcttccgatatttctgacggtgagcttggcattcaaggatattttatctgtggg

SEQ ID NO: 6294 - DNA, 72 bp, Homo sapiens
acgcggcccgtacttccaccgcatctcagattgaccgccgtaacagcaggatgagagggaatgcccctctgc

SEQ ID NO: 6295 - DNA, 72 bp, Homo sapiens
aatcccattacctcatcctgctgggggggagggggcggagagagaagagagggagtgaacagccctgggcta

SEQ ID NO: 6296 - DNA, 72 bp, Homo sapiens
gggcttggcagtgtctgacctggagatgctccaagcgtggggaatgtacgaggcacggccttgccctgccct

SEQ ID NO: 6297 - DNA, 72 bp, Homo sapiens
aaaatgatacctggaggcttatctgaggccaaacccgccactccagaaatccaggagattgttgataaggtg

SEQ ID NO: 6298 - DNA, 72 bp, Homo sapiens
cacacgctggcatctaacacaatgccaaagcgtaccgaagtctgagcatggatgtggatgaatggaggtgat

SEQ ID NO: 6299 - DNA, 72 bp, Homo sapiens
cttccttctcgcttttgcacagatggcaatatcaacggtgtctagagactattgatagtttgcctcacctag

SEQ ID NO: 6300 - DNA, 72 bp, Homo sapiens
aaaggagaaggtttgggaatggctggctgtgtgcccgtgtatgtatgggcacatctcattgttgatatgtct

SEQ ID NO: 6301 - DNA, 72 bp, Homo sapiens
gacactgcctcagtccactagagttcacattccttcgtctggtcaatgttgactttttagtctgcctgcttc

SEQ ID NO: 6302 - DNA, 72 bp, Homo sapiens
gtgccagaactgcaaaatttgctcccccatctccccggactgtttcaatttcccacaaggctgagttataca

SEQ ID NO: 6303 - DNA, 72 bp, Homo sapiens
gtcagagtcggcccaccctccgagctctcttagggcgatgtccttgctaatttggagactgattcagtcccc

SEQ ID NO: 6304 - DNA, 72 bp, Homo sapiens
caggccgtgcagcaccaagccacccgggtgtgcttcgcgaaaggggcaccactgcccggcaagcagggaaca

SEQ ID NO: 6305 - DNA, 72 bp, Homo sapiens
atagtcctttgcatgaagaaactaatagcgcaacacgggacacgtgggtggctttgctacctggtgggcatt

SEQ ID NO: 6306 - DNA, 72 bp, Homo sapiens
tctccccatttcatgtaaacagaattgccagggaccggttaccgtggatatgtttttctaaaaactcagtgt

SEQ ID NO: 6307 - DNA, 72 bp, Homo sapiens
ctctctgaccatcttgggtgtcctctgttttcgcccggctgactgtcctgtggtcaccccaccttccctatg

SEQ ID NO: 6308 - DNA, 72 bp, Homo sapiens
ttcagccttggagaggatggcttctcaggccgcctcgcagcagatttgtagtctggttgctgtcgttcctga

SEQ ID NO: 6309 - DNA, 72 bp, Homo sapiens
cagtttgcacaccgacactaagctcaaaagcaagacggagaataagccaactagacttggcctggctggcta

SEQ ID NO: 6310 - DNA, 72 bp, Homo sapiens
gatttttttgagccattgggggatcgaggctgcagcgaaatgagattgcaccagtgcgctccatctggtggc

SEQ ID NO: 6311 - DNA, 72 bp, Homo sapiens
acaccaatgttcagaaacaaggagactattcttgtcgaggctgtcataactcagaaacgtctgtaaggggat

SEQ ID NO: 6312 - DNA, 72 bp, Homo sapiens
gtctttactctctacttccttctcaaagtgccaaccgcagcctttcaagccctgggtttcccctctggaaaa

SEQ ID NO: 6313 - DNA, 72 bp, Homo sapiens
tgtgcccgccacgtgctagcctatcgcccagctcgcgcctcaaaacttgagaggctttcttggcttgagaag

SEQ ID NO: 6314 - DNA, 72 bp, Homo sapiens
gtgtcatgggggtgatgccttctggcctctgggcacgggggttgggtgtgcaaagggtggcagcaaggaagg

SEQ ID NO: 6315 - DNA, 72 bp, Homo sapiens
agctcctccatggcaatgtgccaggtgcagtgctacgaacatcatatacatcatctcattaattctgcgtgg

SEQ ID NO: 6316 - DNA, 72 bp, Homo sapiens
aaagaaagaaattaatgtatgtaaagcacttagcacgaagcctgggacctggtgaacattcaccaagttatt

SEQ ID NO: 6317 - DNA, 72 bp, Homo sapiens
cagagtttgagaaattgacagaaaccccatggcagcgatctctgtggttatccttatgtttcctctaggatt

SEQ ID NO: 6318 - DNA, 72 bp, Homo sapiens
gattgggaaatcaccgggttaactcaaaaatgttgcgctagagtcctggaaatctgttacccgtgcttacct

SEQ ID NO: 6319 - DNA, 72 bp, Homo sapiens
cccagcactgccccttcaagcctcccacagggtcccgcccaggactcctgggctctgtgtccgcggggccat

SEQ ID NO: 6320 - DNA, 72 bp, Homo sapiens
gacacatctggatcccgtgtgcccggtgttcaagacggcctacctggaccatggcccccacgatcttccggg

SEQ ID NO: 6321 - DNA, 72 bp, Homo sapiens
ttggttgtgatgaaaagtgagtacactgggccgggcgcagtggctcacgcctgtaatcccagcactctggga

SEQ ID NO: 6322 - DNA, 72 bp, Homo sapiens
acagacggcacctggaaaatcgggccactcccacccgaatactgcgcttttccgacgggcttaggaaacggt

SEQ ID NO: 6323 - DNA, 72 bp, Homo sapiens
tcccagctactaggcagtctgaggcaggagaatggcgtgagcctgggaggaggagcttgcagtgagcctagt

SEQ ID NO: 6324 - DNA, 72 bp, Homo sapiens
aggcccggggcatgagagaggatccttgtaggtttcggaggtgggggggctgcactccattgttcactccgg

SEQ ID NO: 6325 - DNA, 72 bp, Homo sapiens
cttcaggcggcgcggaggatttcgaggccctgaggcgcggcccttaatttccggaagtgggggccgcgccgc

SEQ ID NO: 6326 - DNA, 72 bp, Homo sapiens
cagatggccaacaaggccctatgggacctgccacccgctgttcccctgagtgctctccaggcccactggcct

SEQ ID NO: 6327 - DNA, 72 bp, Homo sapiens
gagaactcccaaaaggctggctccagccaaggccacgggtgagacaagcctgtgttatgcgcttatataatg

SEQ ID NO: 6328 - DNA, 72 bp, Homo sapiens
gactattttgaaatgttgaccttcattgaggaaatcgagtgaaaaatttattttggtgggcaaggggaggaa

SEQ ID NO: 6329 - DNA, 72 bp, Homo sapiens
aagtgctgggattacaggcatgagccaccgcacctcgccgggtaatgattcttgagacaagaggtggttaag

SEQ ID NO: 6330 - DNA, 72 bp, Homo sapiens
gcgcggtgggcccagcctacctgtggtgagggcctcggcggttgcgatgtgcatgatggtgttgtcactcac

SEQ ID NO: 6331 - DNA, 72 bp, Homo sapiens
tcgaattcctctcttagggaagcttagttaataagcgagggcatgaaggctgcgactggggccctcctggtc

SEQ ID NO: 6332 - DNA, 72 bp, Homo sapiens
aagctgagcagtgcacgtggggtgtaggggccttccggaccaacagggggagcagtgtggcgcaagaggaag

SEQ ID NO: 6333 - DNA, 72 bp, Homo sapiens
agggaggagttcacagtagtgacacagattgccctcgctgtgtgaggcacccctcagggggctcccttagac

SEQ ID NO: 6334 - DNA, 72 bp, Homo sapiens
ccctcctccctgtactcacccaaccaactgactctcggagattgcccaaccaaagagcagaagttcacagaa

SEQ ID NO: 6335 - DNA, 72 bp, Homo sapiens
actaacccaggggatgccacctctgctgctccagtcgtctctctcgaggctacttcttttgctttgttttaa

SEQ ID NO: 6336 - DNA, 72 bp, Homo sapiens
ggaaaaatataaagaaaacaaaatccaactaaggccgtttttccccaggaaaggcattagtcaggcagccgc

SEQ ID NO: 6337 - DNA, 72 bp, Homo sapiens
tagcactatagagttgctgtgacaaccaaaaaaggcgctttcatacatttatttccaaacacttctcagtgg

SEQ ID NO: 6338 - DNA, 72 bp, Homo sapiens
tctgtctgggtgagccctcgccatggaggcagacacgtgatgatggaaacacaacacaagctggtggcaagc

SEQ ID NO: 6339 - DNA, 72 bp, Homo sapiens
cccatgccaggaggctgtggttggtcaaggcctcacgggagggcccagtctgaatgaacaagcaggaggaag

SEQ ID NO: 6340 - DNA, 72 bp, Homo sapiens
aacgtgattattcaatgggcatgcgcttccggccacgcatcacacgcacatacaccagcgcggttatccata

SEQ ID NO: 6341 - DNA, 72 bp, Homo sapiens
ggttggggtgcctcgggccgcgcaggagcccacggcgggggcgaggctcaggcatggcgggctgcaggtccc

SEQ ID NO: 6342 - DNA, 72 bp, Homo sapiens
ggggtgcccttgcctaacttggtggggctagaacccgagtactgatgcaaccaagctggtttcctactgcag

SEQ ID NO: 6343 - DNA, 72 bp, Homo sapiens
cctcactgtggtcctagtcaatgcgtggtaggtagcgtttccagtgatcaacaaaagtaaatatttgaccag

SEQ ID NO: 6344 - DNA, 72 bp, Homo sapiens
agagccacaaggcccccttgtaaggagttggtgctcgggaatcagcagaagcatgcatcaggggcagcagag

SEQ ID NO: 6345 - DNA, 72 bp, Homo sapiens
cacctgggtctgacactcaggggctgagcaagacccgggcatggtatggatgccaaggggagccaagaacca

SEQ ID NO: 6346 - DNA, 72 bp, Homo sapiens
agagtcctttctttgttccctaacagtcctggttccgtctcaggttcccacatttctcccttttgatctctg

SEQ ID NO: 6347 - DNA, 72 bp, Homo sapiens
gaccttcactaggacccctgatagatatgataatacggcacctctgaccaattagaaagggcaactcttcct

SEQ ID NO: 6348 - DNA, 72 bp, Homo sapiens
gtcacacatgtggccttagaacctgctaagtccaacgtcagcatgtgacaggaggggaagtgaggcaagacg

SEQ ID NO: 6349 - DNA, 72 bp, Homo sapiens
agaagaaaacagcctggctctctaagtgggcagtgcgattcccaaggacggcacttcgcctgatagtcttcc

SEQ ID NO: 6350 - DNA, 72 bp, Homo sapiens
tctgacggccaggaaatgttgacttcacctctgttcgcggcagtttgtgaaactacctccttcaggtgtcag

SEQ ID NO: 6351 - DNA, 72 bp, Homo sapiens
agcagtaattgtcacttagccacttaactccccgccgcactgctcactcactcatcgtggtttatctctcag

SEQ ID NO: 6352 - DNA, 72 bp, Homo sapiens
tgttttaagcaagctttgcatgtgattcagatgaacgctagagtttgggaattactggtttacattttaaca

SEQ ID NO: 6353 - DNA, 72 bp, Homo sapiens
gaactctgcatgatatctatcaccatattccctcgcgtcaacagggagaatgaggttcgggaggttatgtaa

SEQ ID NO: 6354 - DNA, 72 bp, Homo sapiens
gggaggtctttgggcatcgcggtctggggttgggacgtgtaagcgcctgggagagcctagaccaggctccgg

SEQ ID NO: 6355 - DNA, 72 bp, Homo sapiens
ctgcccggaccgcaccctggactctgcctgggacgcgccctcggacgcaggccccggacccgcccgccaact

SEQ ID NO: 6356 - DNA, 72 bp, Homo sapiens
atcaccatctggaaatagagcatgctgctggtgagcgccgcgggcagcaggggcatgcacgcctcccgggcc

SEQ ID NO: 6357 - DNA, 72 bp, Homo sapiens
tacacacaccctagtctctcctcccagacccccttcgcaggggtctctgggctccaggactctccaggcttc

SEQ ID NO: 6358 - DNA, 72 bp, Homo sapiens
cgtggctgcagacagcagctgctgagaatgacacgcgactctgatgaaagcgatacagcttagccggtctgg

SEQ ID NO: 6359 - DNA, 72 bp, Homo sapiens
tagctcaggctttgctttaggtgaacaaataatgccgctggacaggaataggttctcttcagttacatggtt

SEQ ID NO: 6360 - DNA, 72 bp, Homo sapiens
catgaggacactcaagctgcccatgaagaggcccacgtggtaaagaactgagacctcctgccaacagccagt

SEQ ID NO: 6361 - DNA, 72 bp, Homo sapiens
tttaggtcttgcaatgctctgagccctcctctcctcgccttagaatgcaactgctaaaccctgccctgcctg

SEQ ID NO: 6362 - DNA, 72 bp, Homo sapiens
aaagcacctgctcccaaccacacctgccgggggcacgctttcgaagaggaatgagactgagacctgtgctca

SEQ ID NO: 6363 - DNA, 72 bp, Homo sapiens
aatcagtacgcacgagtacttccccacaggcggtgcggaatcgtgtgtccgcgtgtggacggcaggccgttc

SEQ ID NO: 6364 - DNA, 72 bp, Homo sapiens
aaatcaaacctccctacaaatgtcagtgagcagttcgatttcaggcaccctttatactgcttttttataggt

SEQ ID NO: 6365 - DNA, 72 bp, Homo sapiens
aagaaacaaaaactttcaagactccaactggtccccggggacagacccccactgttctgtaaggcagaatgc

SEQ ID NO: 6366 - DNA, 72 bp, Homo sapiens
tttgaggcaaggcaaggggacagatattttccttacgttattagttgtgcaacagaagccaattaagagatt

SEQ ID NO: 6367 - DNA, 72 bp, Homo sapiens
tctagcataaagtcaaataagcctctctgttgaaacggtccagcccaggaaacttgtgcaagcagaaggagg

SEQ ID NO: 6368 - DNA, 72 bp, Homo sapiens
gtcatttcacactccagctgcctgccccgggctcacgtccctccccgccatgctctctttttgtacctggac

SEQ ID NO: 6369 - DNA, 72 bp, Homo sapiens
cacttcctttattcctgagtttcccatggctctggcggaaccccagcactcaccaagccatgctctggggct

SEQ ID NO: 6370 - DNA, 72 bp, Homo sapiens
gcgccgggacgtgctgcatatgcccggtttcctggcgggtccgtgtgacatgtccaagtccgtctcgctgct

SEQ ID NO: 6371 - DNA, 72 bp, Homo sapiens
catttacactgagccaccagtctctgcctctaatccgggcgaaaacgattgtactgccgagttatggctgca

SEQ ID NO: 6372 - DNA, 72 bp, Homo sapiens
cggcaccacgatggcggccactgcgcgggtgtgcgcgccgtccaggggcccgtcctgggagtgcacgcccag

SEQ ID NO: 6373 - DNA, 72 bp, Homo sapiens
aggaatttctttttcggggagctcggctcttaagacgcgagtctgccgacgctcccggccgaataaaaacct

SEQ ID NO: 6374 - DNA, 72 bp, Homo sapiens
ggttttgaagcagagtgtcggtccttccttccatacgcctgaaacgcataatccggggctttttgagagcaa

SEQ ID NO: 6375 - DNA, 72 bp, Homo sapiens
aggccaggaggggtttggggggagccagtcctgaccggtcctgacaggacccagacatccagtcccaggtta

SEQ ID NO: 6376 - DNA, 72 bp, Homo sapiens
ccaggtcagtggacagaggaggccctgagaatagtcgtgcatactggctccctggatctgctccaagacagt

SEQ ID NO: 6377 - DNA, 72 bp, Homo sapiens
gctaatttttgtatttagtagagacaggatttcaacgtgttgcccgggctcgtctcaaactccccagctctg

SEQ ID NO: 6378 - DNA, 72 bp, Homo sapiens
gtctcaaaaccactaatgctctattatctaggaggcgctgtagccttggtatgcatcttactggggccagct

SEQ ID NO: 6379 - DNA, 72 bp, Homo sapiens
catgcccaagatcaatgccctgttcagttcctattcgcagtccccagcgcccaggaacatagtccttccagc

SEQ ID NO: 6380 - DNA, 72 bp, Homo sapiens
aagaccgagtattagagacgaaagagatgagagcacgttcttacctccattgcttgccacacagctggcttc

SEQ ID NO: 6381 - DNA, 72 bp, Homo sapiens
actaaagtgaatgtgcttgaacgtgctcttcaaaacgaaaggcagaaggggtcaagccatccgggattcaga

SEQ ID NO: 6382 - DNA, 72 bp, Homo sapiens
tggcttatcaacaaatttatttctcacagttcttccgactggagtgcccaaaatcagggtgtggtcagatat

SEQ ID NO: 6383 - DNA, 72 bp, Homo sapiens
gcccaaccacactcttcacggttcaacgctccacccgccctccactgactcatctagaggtcgagtctcgag

SEQ ID NO: 6384 - DNA, 72 bp, Homo sapiens
atccctgtcatctggatgggtgcctgagtaacttacggcagaaagtggaagccctgggaaggggtggtcccc

SEQ ID NO: 6385 - DNA, 72 bp, Homo sapiens
gccgcagccagtagatcccgggggtgcagggcatgcgggggacacagtcccgggagggcttgtgcgtcagga

SEQ ID NO: 6386 - DNA, 72 bp, Homo sapiens
aggaatcccctgctgtcacacactgggaatcagagcggcacatcctgcccttgcagggccctgaggctctaa

SEQ ID NO: 6387 - DNA, 72 bp, Homo sapiens
atggctcgaaaatttccaaggaaatagcaagagggcgattcccttcttgaagtatttgagggagcagaagct

SEQ ID NO: 6388 - DNA, 72 bp, Homo sapiens
cctgggtgactccagcatggctttcctctccaggacgtcaccggtggcagctgcttccttccagagccggca

SEQ ID NO: 6389 - DNA, 72 bp, Homo sapiens
ccgtgttcctgcgggtgaggacgaacgtgggcgtgcgggtgctctacgaccgtgaagggctccgactgtacc

SEQ ID NO: 6390 - DNA, 72 bp, Homo sapiens
tactctgggggaaaaaaaatagaacaaattcttgccgtcctgaccattgaacaagagactaattagacaatg

SEQ ID NO: 6391 - DNA, 72 bp, Homo sapiens
ggtattcaaattgttctgtaatatgtcaatctgtccgtacaaatttgcagtttcaaaacaagcgttatagct

SEQ ID NO: 6392 - DNA, 72 bp, Homo sapiens
tgagtcaccagcaccagggtctccaaggctgagcccgcctccccaacccccgggacaactccctcggtcccc

SEQ ID NO: 6393 - DNA, 72 bp, Homo sapiens
ctcgtgggcttgcagatgtggtgggcgatgcctaacgtaagatctctggcattcagactccctggttttggg

SEQ ID NO: 6394 - DNA, 72 bp, Homo sapiens
gggcacacgtgtacacacatacacacacgcgcgtgcgcgcataagtgtggggttatttgcatgttctcactg

SEQ ID NO: 6395 - DNA, 72 bp, Homo sapiens
cggcagtggtggcctcaaccatctccccgtccgcccgcatggcaaccacgacgactatttcctctggtcagg

SEQ ID NO: 6396 - DNA, 72 bp, Homo sapiens
ttgcagacaaacctcctaaaagaacatctgtgctccgtataaccccttcctcttcccaggcctcaccccact

SEQ ID NO: 6397 - DNA, 72 bp, Homo sapiens
atccaactcgcttggaaagagtcctttgcaaccctcgtcttcctcctcctcttcttcctcctcctcttcttc

SEQ ID NO: 6398 - DNA, 72 bp, Homo sapiens
ggaaagacagagtcaggacctaactcagtaagaaccggtttggtatgttggaggaaaagcaagaatgctggt

SEQ ID NO: 6399 - DNA, 72 bp, Homo sapiens
aatcacagttaccctctcatactcacatgcaaggacgaggaacttgtttcctattacttcacacccactccc

SEQ ID NO: 6400 - DNA, 72 bp, Homo sapiens
gcacttcccagttctggcagtggcagtggcagcagcggccacatcaggaggggaagaagagaaaagaggaga

SEQ ID NO: 6401 - DNA, 72 bp, Homo sapiens
tgctggcaagccctcacttgctctgcgcgcctcctcggtcttggcgcccatgcttgagaagaatcccttcag

SEQ ID NO: 6402 - DNA, 72 bp, Homo sapiens
gcctaattatttccacttgatgttccttcatctcccgtatcttctataaactgagataaatgtctgtaagct

SEQ ID NO: 6403 - DNA, 72 bp, Homo sapiens
gagaagcaccttcaccacgccagcttcccgggccgcgcttcattgtcatttctggagagtgttattaatatc

SEQ ID NO: 6404 - DNA, 72 bp, Homo sapiens
ataaccgacggtggcatttagtgcagcattaatcacgccacttgggccccccagtgcatacacaaagctcct

SEQ ID NO: 6405 - DNA, 72 bp, Homo sapiens
accagggttctccttcctgtgatcagtcagtcccacgagcacaatcctgtgctgtgactctgcgctgttttg

SEQ ID NO: 6406 - DNA, 72 bp, Homo sapiens
gccacatgcacgtgtaccaagatagtcagctcttacgcttctagaaatgtgttgaccccttctcctaagtat

SEQ ID NO: 6407 - DNA, 72 bp, Homo sapiens
cagagggacacagagacactccccctcccacccaccgagctgagagtcacctggtgtggcctctgtggggct

SEQ ID NO: 6408 - DNA, 72 bp, Homo sapiens
atcgctctgagtagagattgagccagcattttacacgcatatctgtgtacgcatttaccagttcataaagca

SEQ ID NO: 6409 - DNA, 72 bp, Homo sapiens
cacatggagttccagtgcttgcacaatagtctgcacgtgcaaacacaaagctcggtggtctgtgagtggcat

SEQ ID NO: 6410 - DNA, 72 bp, Homo sapiens
gctggagggctaggggggagttcacaattgatggccgaggtgtttatcagtgaactaagagtggatgttgtc

SEQ ID NO: 6411 - DNA, 72 bp, Homo sapiens
aggttttgcccagcagctcttcattttcctgcaaacgccttggtgttcacaagagaaggcagcccgggcaaa

SEQ ID NO: 6412 - DNA, 72 bp, Homo sapiens
tgagctgcagagaagcatccagaatgcagagaaggcggtgctttgcgattgatggctgctgctgcccctccc

SEQ ID NO: 6413 - DNA, 72 bp, Homo sapiens
gctggaaaggaaggaccctaagacctcagtcccaccgagagactttaatccattcctgggatgtgggagagg

SEQ ID NO: 6414 - DNA, 72 bp, Homo sapiens
gatagagagcgaggccagggttctccgaggggtgccgtgctcagatcccgggggtatgtggcgggggatgcg

SEQ ID NO: 6415 - DNA, 72 bp, Homo sapiens
ccacccgggcacgatgactcaccctagacagttcccgttagccgcgctgcagccaccgggcagccatccagc

SEQ ID NO: 6416 - DNA, 72 bp, Homo sapiens
aaaattacgcaatacgtaaaccaaacggcagactgcggacagcagactgcggtgaaatgccagaaaattacg

SEQ ID NO: 6417 - DNA, 72 bp, Homo sapiens
acgggttctctgaacgactgagttccatttttacacgaagtaggcctggggctcagagctggtgggggcagt

SEQ ID NO: 6418 - DNA, 72 bp, Homo sapiens
ggcttctcctctgtgatctgcacctcctgcagctccgccatggtggcctggcaggatgaggaaatgagactg

SEQ ID NO: 6419 - DNA, 72 bp, Homo sapiens
aacacagatctgttactgttctcctgattgagtagcgtccaaggcaagctggtaggaatttcagcatgtgtg

SEQ ID NO: 6420 - DNA, 72 bp, Homo sapiens
ggtggagcctgtcagggacacaggagccaacaaagcgagaacccggcggccagggtagggacagctcgacct

SEQ ID NO: 6421 - DNA, 72 bp, Homo sapiens
aggaggacctacttgctgcctacctaggatgatggcgagaagccagacccttaagttctgggggtcctaagc

SEQ ID NO: 6422 - DNA, 72 bp, Homo sapiens
tgggaaatgacagctaggggctgggggcaggggcccgagcacctcctgagggagtctgcaagcccactccac

SEQ ID NO: 6423 - DNA, 72 bp, Homo sapiens
tctgacttctgggaaatagctttcaagttcttcaccgattggttctaaagccaaacatgcagtttagaagca

SEQ ID NO: 6424 - DNA, 72 bp, Homo sapiens
agtagcctgtgtggtcctgcagcagaatacaggcccgtgctgtcggcccagctcacccccacccaggaatga

SEQ ID NO: 6425 - DNA, 72 bp, Homo sapiens
cagaggtaagcacagagagactcctttcccgtcaccgggtcgtatgcaccaacctgctcggacaggggagag

SEQ ID NO: 6426 - DNA, 72 bp, Homo sapiens
cttaaggcaggcagcccagcccctggcagcacccacgatgcgggacctgcctctcaccagcctggccctagt

SEQ ID NO: 6427 - DNA, 72 bp, Homo sapiens
ctcctgaccaagaccaacaggatgccacgctgggccgagcgactatttcctgccaatgttgctcactcggtg

SEQ ID NO: 6428 - DNA, 72 bp, Homo sapiens
agtttgggacaagtcaggcacttgttactcccctgcggtccgggtggacgcaggcgaccggcctggcaggga

SEQ ID NO: 6429 - DNA, 72 bp, Homo sapiens
gataatgtgcttagtgcttttcaaaccacgggtttcgaaacttattagtgggttgcaaaatgcctctaatgg

SEQ ID NO: 6430 - DNA, 72 bp, Homo sapiens
gtacatgtatcagggagggcctgaggaacaattcccgtctgcacataggaactgccctgtccagtgtccatg

SEQ ID NO: 6431 - DNA, 72 bp, Homo sapiens
cccgccctccactgactcatctagaggtcgagtctcgaggtttctttaaaacacgtaagtgtctttcggtta

SEQ ID NO: 6432 - DNA, 72 bp, Homo sapiens
cggactctggagccatgcagaatacgcctactccccgttcgacatgatagaccttcagatattgggggggca

SEQ ID NO: 6433 - DNA, 72 bp, Homo sapiens
ggggtggtgagaagctgcccgaccaggtcggtgagcgccagccagccgatgcacagcaggaaggacttcttg

SEQ ID NO: 6434 - DNA, 72 bp, Homo sapiens
gggaagacctctcagaaatattcaagaaaggttcacgcatcagggaagggaaggaatcagagaacttctttg

SEQ ID NO: 6435 - DNA, 72 bp, Homo sapiens
gtcataagtcaggctccttgaaacacttttatgagcgccttaatgagggagatgagctgtcatcaggaactc

SEQ ID NO: 6436 - DNA, 72 bp, Homo sapiens
cggcgcgtgggccctggggttggaagtgcctcagacgcactttacattttccccgaattcacccttcgcagt

SEQ ID NO: 6437 - DNA, 72 bp, Homo sapiens
ccagttcaccttctatggggtgactaggaggttcccggtaactagggcagcccaggcccagcaggttgcaaa

SEQ ID NO: 6438 - DNA, 72 bp, Homo sapiens
ttctcagattatgaaataggaaaaatttccttcctcgtgagataagcacgtgccattagctattaaggacac

SEQ ID NO: 6439 - DNA, 72 bp, Homo sapiens
cgggagaggggagaggccaaagcgccaggaagcaccgtcaagactgaggcaatataggcaggaccgataaaa

SEQ ID NO: 6440 - DNA, 72 bp, Homo sapiens
tacgtgtccgtgagcgcgcagagcggggtggtgttcgcgcagcgcgccttcgaccacgagcagctgcgcacc

SEQ ID NO: 6441 - DNA, 72 bp, Homo sapiens
aagagcagccgctgagctcatgaaaaacctgttcgcgcagaaaccgctctgtgccccgtggaggagctacga

SEQ ID NO: 6442 - DNA, 72 bp, Homo sapiens
gagtcctgccagatctaattttttttccctaatcacgtttgtctcagtcagtagcttaagacaatggaaata

SEQ ID NO: 6443 - DNA, 72 bp, Homo sapiens
aggccctgaatagacttgggacctctacctgcctgcgcagatgggaggagtctgtggtgttttgtataaaca

SEQ ID NO: 6444 - DNA, 72 bp, Homo sapiens
cttgggttcaacagctatgaaagggagaaggaagacggaatttggcagaagcagaagctggcctgtgatgca

SEQ ID NO: 6445 - DNA, 72 bp, Homo sapiens
gcgcgcccgccgagcccacgcccacccggaactcgcgctggcccgcaagcgccgcgctcagccgctgttccc

SEQ ID NO: 6446 - DNA, 72 bp, Homo sapiens
cactctgctctgaggagctgtctgtgcccagcacgcgttccagcttctgggatgcacaataggcgcccaggc

SEQ ID NO: 6447 - DNA, 72 bp, Homo sapiens
gcgggcccgccgagcccacgcccacccggagctggcgctggcctgcaagcacagtgcgcagccccggttgcc

SEQ ID NO: 6448 - DNA, 72 bp, Homo sapiens
tggggattaaggtgataccctaaaaccccggagggcgcacgtaggatcaggtgcacccttcctgcagcgcct

SEQ ID NO: 6449 - DNA, 72 bp, Homo sapiens
aaactaattttggctactaaattagttacttccctcgggcctaccaatcttcatatgtataccatggcttat

SEQ ID NO: 6450 - DNA, 72 bp, Homo sapiens
caggccgggggcgggaagagaagatgcaagctgcgcgggcggtcctgggttctgcagacacccgaagaaact

SEQ ID NO: 6451 - DNA, 72 bp, Homo sapiens
agtgaggaactggtggaggcagcaagtagggagggcggctcccgaggaatgtgtgagggctgcctgcgatta

SEQ ID NO: 6452 - DNA, 72 bp, Homo sapiens
ggcaggaagtggctgtagatgaggcaggagaggaacgctgtggccagtgacaaatggtcttgaataacacac

SEQ ID NO: 6453 - DNA, 72 bp, Homo sapiens
caaaatagggagacctactgcgggggaagcagccccgctctggatagaaaggctggtgggtgctagcttcca

SEQ ID NO: 6454 - DNA, 72 bp, Homo sapiens
tttaaacccttaagcccaaggaaatcgtagcatcgcgggacagggaaaatgaaagactttggaagtcgtcag

SEQ ID NO: 6455 - DNA, 72 bp, Homo sapiens
gttcagaataccatggagagaagacagcaggctgtcgtggatgctggagttcacgagaaaggtaccttgtag

SEQ ID NO: 6456 - DNA, 72 bp, Homo sapiens
tctggagcggacaggcgtatttaatatcccacccacgcatcacctaacagcctctggggcggtgtgttcctt

SEQ ID NO: 6457 - DNA, 72 bp, Homo sapiens
tctcttatgtcagaaatcagcctgagcctgagtaccgctaaggctttaatcacgggtcccgagagccctaag

SEQ ID NO: 6458 - DNA, 72 bp, Homo sapiens
agacagaactacacacacaggccacacagataattcggtaccagaaacatgatgctgagtgacaaaggccag

SEQ ID NO: 6459 - DNA, 72 bp, Homo sapiens
agccttttgactactttattgcctaatcaccccatcgcagtgaaatttctctgcatctgtttatgggttgta

SEQ ID NO: 6460 - DNA, 72 bp, Homo sapiens
cctcccctgtacccttctcactgccaggagaactacgtgtgaaggtattcaaggcagggagtatacattgct

SEQ ID NO: 6461 - DNA, 72 bp, Homo sapiens
tatgcctttaggactcttatttatttattttgagacggagtttcactcttgttgcccagggtggagtgcaat

SEQ ID NO: 6462 - DNA, 72 bp, Homo sapiens
tagtttcactcgtcgcccaggccggagcacaatggcgcgatctcggatcattgcaacctctgcctcccgggt

SEQ ID NO: 6463 - DNA, 72 bp, Homo sapiens
tggagggactgttacagagccccaggagcttgctgcgacagggaggggacaggaagactccgccctggccct

SEQ ID NO: 6464 - DNA, 72 bp, Homo sapiens
caggtcggccagtgtgaggttgaaccccggctcttcgctgggcgtcgcgttccacatgctgccggctcagct

SEQ ID NO: 6465 - DNA, 72 bp, Homo sapiens
cgcctccacttctccttccacccacgagataaaagcgggtttgggaactgaaaatcctgcgaaggagaaaca

SEQ ID NO: 6466 - DNA, 72 bp, Homo sapiens
cagcccagttctcagagagcccttggaaggggtctcggtggagctgtgcaccagcagccaagcagaaagaaa

SEQ ID NO: 6467 - DNA, 72 bp, Homo sapiens
ggactgtggactgaggtttgagtcccttcccgggacgcggtggtaaatgactccctaaagtctcctggccat

SEQ ID NO: 6468 - DNA, 72 bp, Homo sapiens
gctgccagggacatggctctgcccgggagccaggccgggcccagagcagacccctgcctgcagcccggctgc

SEQ ID NO: 6469 - DNA, 72 bp, Homo sapiens
aagtctgacctacagctgggtgggacagaaaatttcgctaccctgccttctacccgcccgagggcgcaggct

SEQ ID NO: 6470 - DNA, 72 bp, Homo sapiens
tgggagtccaggaattaatagccctgccgaggctccggggctctggagatggagctatttaaagtcaagaaa

SEQ ID NO: 6471 - DNA, 72 bp, Homo sapiens
gctgataagggagcgtgggaacccagcgggcaggccggggcagctcccccaggaactttccaaaacaagcgc

SEQ ID NO: 6472 - DNA, 72 bp, Homo sapiens
cagcctgagaaacaccctagagacctgtgacatctcggcccacaccccacattagacctcaagatatatcca

SEQ ID NO: 6473 - DNA, 72 bp, Homo sapiens
ttagggagagctattcaaaagtaacttgagtaaggcgggacttggtaagtgcaaaaatgaagggtcacgaaa

SEQ ID NO: 6474 - DNA, 72 bp, Homo sapiens
tacgtccagtcgctgtacaaccacctgcgtcgcttcgagtaaagcccctgagcctggattgccaaagagcag

SEQ ID NO: 6475 - DNA, 72 bp, Homo sapiens
tgggctgcctttgattttctcctccctgggccccacgcagctgcagccgggccgggcccagccctacactgc

SEQ ID NO: 6476 - DNA, 72 bp, Homo sapiens
agagtttcttcaggctgcttcatttttccacgatgcgcctctcagcgaggctgtattttgtaggaaagttcc

SEQ ID NO: 6477 - DNA, 72 bp, Homo sapiens
ggggctgggggaatgctgaacaggctggccaggaacgacgccagagttgaactccagacgaggtaccactgg

SEQ ID NO: 6478 - DNA, 72 bp, Homo sapiens
ctgggtctcacagcgtgtgtggtcggccccgcccccggctctgaatcggtgacccgtgctggcctctgcctt

SEQ ID NO: 6479 - DNA, 72 bp, Homo sapiens
tggtggcctcatcttgccctaaccagtcgactcatcgttcaagtccccagggaaaatcctggctgaagcctc

SEQ ID NO: 6480 - DNA, 72 bp, Homo sapiens
ttggtctggtgcctagggaggcaagaactccaagacgccaggatgagaattgcgacatctgcttgttgaact

SEQ ID NO: 6481 - DNA, 72 bp, Homo sapiens
atccctcttccttccactcctggaacctaaataaacgggtaaaaagaaaacaactgggccaggcgcggtggc

SEQ ID NO: 6482 - DNA, 72 bp, Homo sapiens
ctttcgttcaacaaatatttgtggagtgcctattacgtgccagaagctgttctggacactgagaaacaggga

SEQ ID NO: 6483 - DNA, 72 bp, Homo sapiens
aggcaattgcacaaataggagtccatgaatggactcgcaaattgggcagggatcctgactagcactttttat

SEQ ID NO: 6484 - DNA, 72 bp, Homo sapiens
gctcttattattcacaggaagtgcacaaacacacacgagcttcccaaacctgggaggcccatggctccccag

SEQ ID NO: 6485 - DNA, 72 bp, Homo sapiens
ccggcatggagcagtttggtttccaccctattgcacgtggtccggcctggttatgaaatcaggaggctgctg

SEQ ID NO: 6486 - DNA, 72 bp, Homo sapiens
atggcccgagccatccatctacattatgtcatgggcggtgagcctcctcctccgtccagtccgtctggccgt

SEQ ID NO: 6487 - DNA, 72 bp, Homo sapiens
gcccagcccagcccttgctcctgccctgcacacagcggagcgacttttctaggtatgctcttgatttctgca

SEQ ID NO: 6488 - DNA, 72 bp, Homo sapiens
tgtctgtgctgctcacggtagctgcatcagcttcacgctgtccgcccttcgccacccaccgcgcctgctgct

SEQ ID NO: 6489 - DNA, 72 bp, Homo sapiens
gtgagcacgtccagtgctgctgagctgccctctaccgtaaccgtgtgctacaagagctctaccttaattaat

SEQ ID NO: 6490 - DNA, 72 bp, Homo sapiens
tgcaggcccccttgggaataagcggcaagaagcttcggggtccagtttgcaccgagcccctccagcggggac

SEQ ID NO: 6491 - DNA, 72 bp, Homo sapiens
catgtgcaaacactttttcttcttcggtgaagtaacgattaggaacaggaaccttcactgtcttgttcactg

SEQ ID NO: 6492 - DNA, 72 bp, Homo sapiens
tgagagcccatgccacttccacacaggccgagggccggcacccacggtgagctggctcatgctcccaccacg

SEQ ID NO: 6493 - DNA, 72 bp, Homo sapiens
cccagtgcgggagcggccagcccaccctagagaagcgagacaagggcaaccagaaggaaccgagtctgagga

SEQ ID NO: 6494 - DNA, 72 bp, Homo sapiens
tgtggggtcagcgcttctctctggcttcccctcagcggcgccaaggcgaggggagcgcagaaccccggctca

SEQ ID NO: 6495 - DNA, 72 bp, Homo sapiens
gagtgtgggcgggggctggtgcctggaggggccttcgagtgaggcagcattgtatggggaccatgtggtcac

SEQ ID NO: 6496 - DNA, 72 bp, Homo sapiens
ctagggagttgccaaacaccccactgaggactctgcgccagaccacagacacaactcatgccataaaagtag

SEQ ID NO: 6497 - DNA, 72 bp, Homo sapiens
ggtgttgagtcaggggaagcagggatacacacgggcgggaaactcaggtctcctaaatgtcagagcctcagg

SEQ ID NO: 6498 - DNA, 72 bp, Homo sapiens
tgaactagtcaattatctcaggggaaaacaacaaacgattgctttatggtttagagcacacctgtgcgtggc

SEQ ID NO: 6499 - DNA, 72 bp, Homo sapiens
tgaaggggggcagggaggggaactggccaggagggcgacaggctgcccagcaggcacccagagctttgcgta

SEQ ID NO: 6500 - DNA, 72 bp, Homo sapiens
cctgatgagcttccagctgagcactgggtgtcactcgggctttacctgcttatcttcaggatctctcttctg

SEQ ID NO: 6501 - DNA, 72 bp, Homo sapiens
aaaagcctaagctttcttacatcatctgcagagtacgaacattcattcattcattcattcatgtctttcttt

SEQ ID NO: 6502 - DNA, 72 bp, Homo sapiens
gcagcctcagatgcgccgttttgtcgcatcattaccgtgggtaatgttccagccaggggagcctcccgctcc

SEQ ID NO: 6503 - DNA, 72 bp, Homo sapiens
gaggtgaggcttgccgtgcaaagctggaaagagggcgtttgtttgcagagcagagctgacatcaaagtgtag

SEQ ID NO: 6504 - DNA, 72 bp, Homo sapiens
tcaacgcaactgtgcttcccggcgctggggtcaatcggatccccagatgggttctaagcactgcgcaacatg

SEQ ID NO: 6505 - DNA, 72 bp, Homo sapiens
actaggctaataggcaaggagcactttggggccaacggggaagatataaaaacaggaacagatatttaatga

SEQ ID NO: 6506 - DNA, 72 bp, Homo sapiens
tcctgtcttcctttatgtggggtaactctccgttccgttccccaagccttcacagagtgacaccttcacaga

SEQ ID NO: 6507 - DNA, 72 bp, Homo sapiens
cacccaaagtgactaaccagtcttttggttctacacgtggcaaaggaccaccttctgatttcctgacctccc

SEQ ID NO: 6508 - DNA, 72 bp, Homo sapiens
aaacgcaggggcccagcatagtgcctgatacgcggcgagagtttagtcaccgacgtcggttgttggtggtga

SEQ ID NO: 6509 - DNA, 72 bp, Homo sapiens
tttgaatttttaacccacagcacaagtccttcaatcgttttcaataaacagagggagagggagactctgatg

SEQ ID NO: 6510 - DNA, 72 bp, Homo sapiens
ggcccggatctaacttggcggtgacagcccagccccgagctggacatggcaggcccctcggcctggccgttg

SEQ ID NO: 6511 - DNA, 72 bp, Homo sapiens
ctagagccgggtgcctcgctgggagccggtgaggacggtgtgcaggctggaaatgtcccagctgctgaatca

SEQ ID NO: 6512 - DNA, 72 bp, Homo sapiens
ctcagaattaaacgtttgctcccccttagggctttcgtgtgggaagatgtcctattatttaggggtcgcctc

SEQ ID NO: 6513 - DNA, 72 bp, Homo sapiens
aaaaaaaaaaaaaaaaaaaaaaaaatccatagacccgcaggaggttaggggacaaagttctggaccttgatc

SEQ ID NO: 6514 - DNA, 72 bp, Homo sapiens
agccctgcaaggctggctgaggtgtgactgtggcccgcctgctgggcgagggtgggggacaagcgggccact

SEQ ID NO: 6515 - DNA, 72 bp, Homo sapiens
gttattcatagcagcctgggccaggacctgtttgccgctcctggctttaaaagtcccagctcctcccctgct

SEQ ID NO: 6516 - DNA, 72 bp, Homo sapiens
gggtcactacctgattctcataggcctcctctcggcggcggatggggacatcgctggcacacacatacacgt

SEQ ID NO: 6517 - DNA, 72 bp, Homo sapiens
cagcctgggcctcggggaagcccgtgtctcatgggcggttgtccagctgctcaggcctgcacaggggcgggt

SEQ ID NO: 6518 - DNA, 72 bp, Homo sapiens
tgcacccctgcgctaggctagaaggaggagaatttcgagaagcatggaaagcgtaagggctccttccagata

SEQ ID NO: 6519 - DNA, 72 bp, Homo sapiens
atccacagagcttttctttctccttccttcctggacggacgctataaagtctgcagctttgctgtgctctac

SEQ ID NO: 6520 - DNA, 72 bp, Homo sapiens
tagcagattcatagaaaccactaggacaaggcaggcgtgattaaacacacagctttgtgccggtttgccaaa

SEQ ID NO: 6521 - DNA, 72 bp, Homo sapiens
tcggcctggtaaggctctctccaacaacaagctaacgcccactcctgcagcaagcgcccacagccagtggtt

SEQ ID NO: 6522 - DNA, 72 bp, Homo sapiens
ccttcggagtaggcggtggggctgggggaagaggacggaaccatgaggtctctccatcacttcccgggtgtg

SEQ ID NO: 6523 - DNA, 72 bp, Homo sapiens
aatagttccacttatatgaggtacatagtcaaattcgcatatacagaaagtagaacagtggttttccagggg

SEQ ID NO: 6524 - DNA, 72 bp, Homo sapiens
acattcctgggatctaccccagacctgctgaatcacgatgctcagctggggcaggaagtgattgtaaagttc

SEQ ID NO: 6525 - DNA, 72 bp, Homo sapiens
agcgccagccccagtggtaccactgctggggagcccgctggggtccgagtccgcccactgtggggatgttgt

SEQ ID NO: 6526 - DNA, 72 bp, Homo sapiens
gggtgccttggaatagaagctcagaaggaagaaaacgacattttcaactttcaggaactagctctgtcgccc

SEQ ID NO: 6527 - DNA, 72 bp, Homo sapiens
tgccagaccctgctctggaccatcaaggcaacagccggggagtgtgggcgatgtccccgcccatcacttctg

SEQ ID NO: 6528 - DNA, 72 bp, Homo sapiens
aagctactcaggcagcctctgtttcctcacttcagcggggtgggcttgggtgtgggtgaaagagataagata

SEQ ID NO: 6529 - DNA, 72 bp, Homo sapiens
gcacccccttcccccactttcaagcaagggaggtacgtccttagcctggggttccgagcaggtatctcccag

SEQ ID NO: 6530 - DNA, 72 bp, Homo sapiens
tctagtcacttagaatcaaaattatagccttgtatcgaaataaatccccacaagacacctgctagttacaaa

SEQ ID NO: 6531 - DNA, 72 bp, Homo sapiens
ggctgtgccgcctctcgttcctgtcctcctggcaccgccggccacccctcagcccagccctcatggttctct

SEQ ID NO: 6532 - DNA, 72 bp, Homo sapiens
ggagggaaggagggaagcggggggaaagaaagatacgtgagataatattcaggtcaaatatggacagttttg

SEQ ID NO: 6533 - DNA, 72 bp, Homo sapiens
tgggtgtcgaggctttcagggctgggcctgcccgccggcccttcagcacaaggctctgcccaggcaggtgct

SEQ ID NO: 6534 - DNA, 72 bp, Homo sapiens
ccccggccctcccccagcctcctcgtctccagccgcgggagaaactcactgtctaggctctgtggcttgtgg

SEQ ID NO: 6535 - DNA, 72 bp, Homo sapiens
tgtgagaaaaagaatcaagaccattgaatgtgtggcggcttatagcatttgacattctgatctgtgcacgtg

SEQ ID NO: 6536 - DNA, 72 bp, Homo sapiens
agggagacatgtgacctttgtcatccaccctatcacgtttgtgttgagcagtatgggttgtgggaaagagct

SEQ ID NO: 6537 - DNA, 72 bp, Homo sapiens
ggcacaggataggctaagtaactcgcccataaccacggctagtaagcggtagaccaactccagctcagccca

SEQ ID NO: 6538 - DNA, 72 bp, Homo sapiens
aaagtggaaactggaagcctgacagctgacagatgcgttttccaattaaaatattgttttaaaaattcctgt

SEQ ID NO: 6539 - DNA, 72 bp, Homo sapiens
agctgctaggaatgaaatgcagaactggagacattcgagagcagaagagcagaagcagcaacaaggtgtggt

SEQ ID NO: 6540 - DNA, 72 bp, Homo sapiens
ttttgtgggtccttcctactccactacagagagttcgtggcatccctagaattactccctgagccttaggtc

SEQ ID NO: 6541 - DNA, 72 bp, Homo sapiens
catttcctgaccacattttgtaacacacagagccccgtaatctccattcatcaagactgatttttccacagc

SEQ ID NO: 6542 - DNA, 72 bp, Homo sapiens
tataatccccttccttccacactacaacctatccacgcatctgtcctcttactccttagcttccatcttaca

SEQ ID NO: 6543 - DNA, 72 bp, Homo sapiens
cactcagtgcccctccccgtcccacccccagccagcgggggccaactccaccctgtcaggaaatgcctgggg

SEQ ID NO: 6544 - DNA, 72 bp, Homo sapiens
tcctcttgaagaggacacacggagccctgggttgacgttataggaggtgttggtgccgtgcactgaagggat

SEQ ID NO: 6545 - DNA, 72 bp, Homo sapiens
cttcatatatctggaaatatgatcagcgcccctgacgtagtggccttcaccaaagaggaagagtatgaagaa

SEQ ID NO: 6546 - DNA, 72 bp, Homo sapiens
aatgaggtgagccgcgaacggggcctagcatagtgcggggcgcactcagcaggtgttgtttatagggatcat

SEQ ID NO: 6547 - DNA, 72 bp, Homo sapiens
ttgtgtttattttaatcactttttcctcctgttttcgggctgtagacaaccccagcccttactcaaattctg

SEQ ID NO: 6548 - DNA, 72 bp, Homo sapiens
gtgcagggaatctgacacgccagggagcaggcagtcgggaggaaggaaaagaacacacatgctggcctccca

SEQ ID NO: 6549 - DNA, 72 bp, Homo sapiens
ccatggaagagccagggaggccttccactgtgcttcgtttgaaaagcaattgagaaagtgggaagctggtgg

SEQ ID NO: 6550 - DNA, 72 bp, Homo sapiens
acctctggcttcaaggctgcaggctccctggggcccgggttgggatgcctcccctggggaggtgcctgatga

SEQ ID NO: 6551 - DNA, 72 bp, Homo sapiens
aagcatgatctatctagttccacttacctcctccccgacgcccccattctgactcttctccagagtggaggt

SEQ ID NO: 6552 - DNA, 72 bp, Homo sapiens
ttcccacctaagcctctccgtgctgggactccggacgcgctccacctcacgcagccgtattcctgctttcaa

SEQ ID NO: 6553 - DNA, 72 bp, Homo sapiens
gaggatgcctggacagagcatccaagaagtgtgggcgcagtgacctgcagagggctcggaaagcatgccaag

SEQ ID NO: 6554 - DNA, 72 bp, Homo sapiens
aggaagcccacggcaatgcccttcatcccacttaccgcagctccagagccctgcgggaggactcagagtcag

SEQ ID NO: 6555 - DNA, 72 bp, Homo sapiens
tgcctgtggcagaaatttacattatcccttcagcccgcttaaaaaattctgtacttcccaagcggctaaatt

SEQ ID NO: 6556 - DNA, 72 bp, Homo sapiens
ccagtacctgtctcttctttggcatttcgaggccccgttcagaccccgccacctggctgagtgccccggcgc

SEQ ID NO: 6557 - DNA, 72 bp, Homo sapiens
ctcttttcggcatctgctcagccttatccttgtcacgtcccagtcccctccccccggccccagcccaggaaa

SEQ ID NO: 6558 - DNA, 72 bp, Homo sapiens
cttccaatgtgacaggtctacaaggacactctacacgtctcgcatgacatcatcctctcttcctcccctgtt

SEQ ID NO: 6559 - DNA, 72 bp, Homo sapiens
ggacgtggactcaggcggggacagcgttgatggagcgtctgctccgcccaggcaccgttcagggcgaagcct

SEQ ID NO: 6560 - DNA, 72 bp, Homo sapiens
ctgcgctcaggcgagtgccagctggcggcggtggacggtgggcaggccggcagcttcctctactgcaatgcc

SEQ ID NO: 6561 - DNA, 72 bp, Homo sapiens
ctggtctccctgggaccagggtgagtccagctaaccgaaggtcttcaaggggaggagctgaggacccagcat

SEQ ID NO: 6562 - DNA, 72 bp, Homo sapiens
gaagtcaatgtggggaacagctgcctctgggaggacgttgtctgtgcgctgtgccgcggggcctctgctcca

SEQ ID NO: 6563 - DNA, 72 bp, Homo sapiens
tagagcactcctgtgggcatgcagagcgcctagtgcgtgccaggtccccagtgcttgagcaccatggtgtat

SEQ ID NO: 6564 - DNA, 72 bp, Homo sapiens
taccccagagctttatgtcacaacattgaggctggcggagaaagaccggccccttcaccccaccttagactt

SEQ ID NO: 6565 - DNA, 72 bp, Homo sapiens
aatgaccatcttttcatgctcaggatttaaccctccgggaacttctgaatgtgtgttgcaacttaaaagaca

SEQ ID NO: 6566 - DNA, 72 bp, Homo sapiens
cattagggcagttccggcgccgacttcgctggggacggggaaggtgacccccctactcggatcccccaggtc

SEQ ID NO: 6567 - DNA, 72 bp, Homo sapiens
agaagtacagattagtggagaggaagaaaggagaacgcattgtggaagttttcaagaaggagacaaagatgc

SEQ ID NO: 6568 - DNA, 72 bp, Homo sapiens
gctcctgtgaatggcattggaaggccgttccagcgcggccgctgaggcagccacttcccccggtgctggggg

SEQ ID NO: 6569 - DNA, 72 bp, Homo sapiens
tacaactccaggagtgccattcacatagactacagcgtgaatggtgcttcctggacttctatgattttgcaa

SEQ ID NO: 6570 - DNA, 72 bp, Homo sapiens
ttcccaggacagaggtgactcagttgtatccagaccgctctgtgactgaacacccactttcttttccttttc

SEQ ID NO: 6571 - DNA, 72 bp, Homo sapiens
ctgtacagactccaatatctcccgggctgggtacacgcaggttcacacccaggtgtgagcaagattgccaaa

SEQ ID NO: 6572 - DNA, 72 bp, Homo sapiens
taggaaggggcctaaccatcaggaaggaggcccttcgggttaaaaactctcataaatggagtggcctacttt

SEQ ID NO: 6573 - DNA, 72 bp, Homo sapiens
acagaacagagaggcagagggattcccgaggtttgcggagcggatcggtaagggtgagccccgaacctgtct

SEQ ID NO: 6574 - DNA, 72 bp, Homo sapiens
ccaagagaggcacagccggcgacagaacggggacccgtgtctgccgccccaggagaggctgcaggccggaaa

SEQ ID NO: 6575 - DNA, 72 bp, Homo sapiens
tgcagccccctaaacccaggaggcgccctggcccgcgctcgccccccagggcctcatgtcggaaccacagcc

SEQ ID NO: 6576 - DNA, 72 bp, Homo sapiens
gtcatccttgcacggggccatgctaatttctgtatcgttcaaaaaaaaatgattgcttaatgtacaaatgtt

SEQ ID NO: 6577 - DNA, 72 bp, Homo sapiens
gggccccgtaaccctggaaagtcccagagctccagcgtggtatggctgctggagaataggtagctctgtcac

SEQ ID NO: 6578 - DNA, 72 bp, Homo sapiens
ctttggggctggattagcatttgcgttgggatccacggcgggaagggtacaggatgggaactgacaaaaaca

SEQ ID NO: 6579 - DNA, 72 bp, Homo sapiens
gaagctaccatatggtatatggattgacattctctcggtcctcacatcctggatttccacatctccataagc

SEQ ID NO: 6580 - DNA, 72 bp, Homo sapiens
taagtcctaagatacacctacttcttttccttactcgttctcacaatggcctgtcctcccctgataaaattc

SEQ ID NO: 6581 - DNA, 72 bp, Homo sapiens
cacagagagatcacatggcttctccaaaagtcaaacgatcaattcgcctcgttttggctctgtacttaatgc

SEQ ID NO: 6582 - DNA, 72 bp, Homo sapiens
tcccaaagtgctgagattacaggcgtgagccaccacgcccagccgacaagtgagtttcaactgcccaaacgt

SEQ ID NO: 6583 - DNA, 72 bp, Homo sapiens
ggtcgctagaaacccatttattccctgacagcccccgtcacatggatggttgtctattaacttgttcaaaaa

SEQ ID NO: 6584 - DNA, 72 bp, Homo sapiens
caggtcctacctccacgacacagcatagagggtgacgtgtctgagggcacacaggctctggttaggctttgt

SEQ ID NO: 6585 - DNA, 72 bp, Homo sapiens
tgatttctgatgtggcttttaaaaactaggccgggcgcggtggctcacgcctataatccagcactttgggag

SEQ ID NO: 6586 - DNA, 72 bp, Homo sapiens
cctgcgctatgacgctggggcactctcagggctgtcggctccagctctttcgaaactcagcatggtatcaag

SEQ ID NO: 6587 - DNA, 72 bp, Homo sapiens
gcccgcctgcccgcccgccgccgaaggagaggagccgcctgcgcagcccccgggcctttgagctgctcccag

SEQ ID NO: 6588 - DNA, 72 bp, Homo sapiens
ggcctgcgggtgtgaatgagcagcagccaagagagcggtgctgccggcgctcaagctaggccgggtcaccgc

SEQ ID NO: 6589 - DNA, 72 bp, Homo sapiens
atcgtctgtttccccggccttgcccccgcccgccccgtgccgtggacatctgggcccactcatcgcccctcc

SEQ ID NO: 6590 - DNA, 72 bp, Homo sapiens
taatctaagaataacatactgccttcaaagaacagcgtcaagtttgagaaaaggaagaattactcccttctc

SEQ ID NO: 6591 - DNA, 72 bp, Homo sapiens
gaaaactgagtttacttcctacctaagcttccatccgcttaataccaaggtgatcaagtctgtgtgctaaat

SEQ ID NO: 6592 - DNA, 72 bp, Homo sapiens
cagtaggtaactgccaatttaaccagtggaaaatacggcagctgcacacagcctgctctatgaatcctttgg

SEQ ID NO: 6593 - DNA, 72 bp, Homo sapiens
actcagctcttggacctcagattcttattcttaaccgctagggggatggagacagaagtcacaaactcacat

SEQ ID NO: 6594 - DNA, 72 bp, Homo sapiens
ctctgcgagtagccttcggaccacctctcagggaacgatctggggagagttcgaaaactagcacctcagtga

SEQ ID NO: 6595 - DNA, 72 bp, Homo sapiens
gcgtctggcaagaacgagataccttctcaagacaacggaagcagctcccctccctccaccctggttgcacaa

SEQ ID NO: 6596 - DNA, 72 bp, Homo sapiens
tttaatatgtaaatcagactagtcaactgttcagacgtcctcgcagtggtatacttgcaccctttcttgcta

SEQ ID NO: 6597 - DNA, 72 bp, Homo sapiens
ggacatacctgatggttgcagaggtgggactttcacgcttgtctcctaggctcttcccacccctctcctgtt

SEQ ID NO: 6598 - DNA, 72 bp, Homo sapiens
ggctctggcggaatggggactattggagggttaagcggatgtggctaaggctgagtcatctaggagtaaaca

SEQ ID NO: 6599 - DNA, 72 bp, Homo sapiens
tcaaggttcaattaaatggtgtactgtagatcagtcgctcttcaaagaaatgaagagagaatagaaaaaaag

SEQ ID NO: 6600 - DNA, 72 bp, Homo sapiens
tccaggctcccacgacagtagggtgggcagtgggccgccaatttctgagaaaatcttcaagaacatgtttct

SEQ ID NO: 6601 - DNA, 72 bp, Homo sapiens
tgtcactctgtacagcacacagatattcacacatacgaagggttctagactcaagcagccccagaggtagga

SEQ ID NO: 6602 - DNA, 72 bp, Homo sapiens
gatgagcgggaggattgcctccaagcacaatgcatcgcgtggacacaaggtgcttacttaatgtcagccctg

SEQ ID NO: 6603 - DNA, 72 bp, Homo sapiens
aagttgttttgcttcctggggacgagagaggcccgcgttcacgggagcgcgcccgcaggccccatccaggca

SEQ ID NO: 6604 - DNA, 72 bp, Homo sapiens
gcaaagcctgttcagtccttcaatccttttttagtcgtttagcttttgcaatgttttcttggcgtttttgct

SEQ ID NO: 6605 - DNA, 72 bp, Homo sapiens
gctggttctccatctgggggcctgcttgtctgcggcgactctttagttcacaggaggggacggccggcgctg

SEQ ID NO: 6606 - DNA, 72 bp, Homo sapiens
gcagcctgggacttgtgaaggcccactgtgtagctcgaggtttccagggcctcggccccgaatgggcgattt

SEQ ID NO: 6607 - DNA, 72 bp, Homo sapiens
ggtcttgagccacagctgcagccaatgcagcagctcgcgcctccttcttccgtttctgtttttcctccttga

SEQ ID NO: 6608 - DNA, 72 bp, Homo sapiens
aactgacaaagaagtgacacacccctaaagctttccgggcttctggtgtcccccaccacccccaccacacac

SEQ ID NO: 6609 - DNA, 72 bp, Homo sapiens
gtagtgagagaaataaaaccctgggaaaaagaaaacgcggaatccggttgctcttctcacagtagccagaag

SEQ ID NO: 6610 - DNA, 72 bp, Homo sapiens
gcaatgagtgtagtctgtgcgaaccgggtgtgtgacgtttgcttttcgggtgtacgggtctccgaatgctgc

SEQ ID NO: 6611 - DNA, 72 bp, Homo sapiens
catggcacaaaaacccattgccatgcataaggttccgtgccaaaataaccactttacgccattgcataacac

SEQ ID NO: 6612 - DNA, 72 bp, Homo sapiens
gctctaacaatgcaaccatgatttctaagactgtacgagtttaaaataaggattcttggcagatctgacgac

SEQ ID NO: 6613 - DNA, 72 bp, Homo sapiens
ctgccccggcttctcctggctgcccgggcgagaggcgcgcactcacctagcctggcgtccaggaggtcggca

SEQ ID NO: 6614 - DNA, 72 bp, Homo sapiens
tcccttgtgcgagactcaactcccaaaagggcccgcgtctgcaccaccagcccctaaccctcccgggcgcca

SEQ ID NO: 6615 - DNA, 72 bp, Homo sapiens
tatgcaagccccattccagctgaggaatgaaaatccggcccatactggaagcacagaggggaaggatagtgt

SEQ ID NO: 6616 - DNA, 72 bp, Homo sapiens
cacattacagggcctcgaatttagggacctaagaccgcctgttcctgatgcacccggccaggccctgtgagg

SEQ ID NO: 6617 - DNA, 72 bp, Homo sapiens
ggtctctcagggcacaagtcacatgccgagccccacgctgctgcccactgggctaaaggtaactagcagaca

SEQ ID NO: 6618 - DNA, 72 bp, Homo sapiens
gctttaggacttaagaacaattgttgtgtctcagccgtggcagttctgtcctatacgtctggcctaaactgt

SEQ ID NO: 6619 - DNA, 72 bp, Homo sapiens
acaaaaggaaataaggaagaagtccaggaggcaaacgctaatgcaatttcaaactggaattacatcagcagc

SEQ ID NO: 6620 - DNA, 72 bp, Homo sapiens
tcagttctgctttgaactgcggccaagaggccaagcggtaatttcatctctcctccagttcttgccgcagga

SEQ ID NO: 6621 - DNA, 72 bp, Homo sapiens
gatgtgagcggggggcagttctagcttcctgattccgtgaagggcataccctcaagtgtaaatctattattt

SEQ ID NO: 6622 - DNA, 72 bp, Homo sapiens
tcccctctataatctactgattgtgggacttcacacgaggtacaaaacataagtgacctaataagccctcta

SEQ ID NO: 6623 - DNA, 72 bp, Homo sapiens
ggcagttggcgggaaatccctggggggtggagcctcggctcgaggtccggccgccccgtaccacgtcatcga

SEQ ID NO: 6624 - DNA, 72 bp, Homo sapiens
tttgattaactagacaggcacatcaactatacacccgttcattgcattgcagtatcctgaaactcaggggca

SEQ ID NO: 6625 - DNA, 72 bp, Homo sapiens
caggccgggctgacccaaggggagaggaccctctccgcccactgccgctggccctgggcaggtctagagcct

SEQ ID NO: 6626 - DNA, 72 bp, Homo sapiens
ggaaacaagacagggcaggaagcccaggcaggcggcgggcactctgggccaggcacaaacaaccaacacagg

SEQ ID NO: 6627 - DNA, 72 bp, Homo sapiens
gaggatccgagtccgagtgggagaggcgcgcggtccgagtgggagaggctgagagtcaactccagggaagtc

SEQ ID NO: 6628 - DNA, 72 bp, Homo sapiens
acctgttggggttcctgactccctcacccacaccacgctgagctacatttcctgctgtggcttactctgggg

SEQ ID NO: 6629 - DNA, 72 bp, Homo sapiens
ccaggccatgccattcaacgccctccaggacaggccgaagggcttgtctgtttggtggttgctaaggtttga

SEQ ID NO: 6630 - DNA, 72 bp, Homo sapiens
tgcaagggctggcatgggcccagaaatgcaatcctcgtgcagagtaggtgcctgtggcaggaggccatgcaa

SEQ ID NO: 6631 - DNA, 72 bp, Homo sapiens
cctgccagtttctgggtgtccttcatccgcatccccggcgcccccagtttgctgttgctcaatggccaggac

SEQ ID NO: 6632 - DNA, 72 bp, Homo sapiens
gcaggcctgctccagtgcggggaggccttaggttacgcccgggagaaaaccagccctgcgctcccgcttccc

SEQ ID NO: 6633 - DNA, 72 bp, Homo sapiens
agagcggaagaggcccagagacgccagaggaggggcgtcagcgggacactcaggccaataagctctgactcc

SEQ ID NO: 6634 - DNA, 72 bp, Homo sapiens
ggggacggtggcacgcgcctgaggtctcagctattcgggaggctgaggtgggagaatcgctagagcccagga

SEQ ID NO: 6635 - DNA, 72 bp, Homo sapiens
tgcatttctcttcctccatcctgctgactggaacacggatgtgaaggctagagctctcagtcaggaggaaga

SEQ ID NO: 6636 - DNA, 72 bp, Homo sapiens
aaatccattgtattatgacataaaatatggctagacgccaaggtttaaccatacataaaaatactaattctc

SEQ ID NO: 6637 - DNA, 72 bp, Homo sapiens
agggctgttccctctccagtcacgggattgtttttcggggggttggctttgcctgaaattacattgcacact

SEQ ID NO: 6638 - DNA, 72 bp, Homo sapiens
tttttttctttttttttggtgaagtctcactgtgtcgcccaggctggagggcagtggtgcaatctcagctca

SEQ ID NO: 6639 - DNA, 72 bp, Homo sapiens
tccttctgtccctctgagtgtgcccccgaaacagtcgagtgaaggtgtaggaccggcccttgcagggaggca

SEQ ID NO: 6640 - DNA, 72 bp, Homo sapiens
agcctggttcaagccataggcaccatctgggtcttcgtcctcatgcccagagccaggctctgtgcccagctt

SEQ ID NO: 6641 - DNA, 72 bp, Homo sapiens
acagacaggcattagctcatttcctgtagtcttgccggggtaggtctgctgcagctttatcacctgctctac

SEQ ID NO: 6642 - DNA, 72 bp, Homo sapiens
aacaagcagaatgaagaagaggaaggagaactgggcgaaagaggatttgagtcagagagaggaacacatgca

SEQ ID NO: 6643 - DNA, 72 bp, Homo sapiens
tactagcacagaaatacgaacaaacatggtttaagcggagatctatgagcagtttggtattattgggaaaca

SEQ ID NO: 6644 - DNA, 72 bp, Homo sapiens
tctctggatgcccaatgcctttggtatttccacctcgcgtgcaggaggaaaagagcgaaatttgacaacaga

SEQ ID NO: 6645 - DNA, 72 bp, Homo sapiens
gcctaactctccagcgtccctgaccctccatcgggcgcacccctgatcctccatgggtgtgccgctgacccc

SEQ ID NO: 6646 - DNA, 72 bp, Homo sapiens
gctagtccccgcccctcggacacacccacagacttcggccccgcgtcccagcactaggccccgcctgacaca

SEQ ID NO: 6647 - DNA, 72 bp, Homo sapiens
aaagtggtgtttgcttaacgtggagccagactacccggaataggtgttttcataccggacggagatcagggt

SEQ ID NO: 6648 - DNA, 72 bp, Homo sapiens
aaatggtacacagcttcctatacaagccagcttctcgtctgatggtcgttcttctccctgagtagagcaccc

SEQ ID NO: 6649 - DNA, 72 bp, Homo sapiens
aaaaccagtcaggcatggcggcgcgtgcctgcaatcgcaggcactcggcaggctgaggcaggagaatcaggc

SEQ ID NO: 6650 - DNA, 72 bp, Homo sapiens
aattttccctgcctgagaaaggctgtatgggcagacgcttgggcctgaagtcagaagatgctgactgtagtc

SEQ ID NO: 6651 - DNA, 72 bp, Homo sapiens
acttttgcttctgtgcccttcaagtgtattttatccgtgccccagttttgcagatgaggagactcggacttg

SEQ ID NO: 6652 - DNA, 72 bp, Homo sapiens
ataaaatttgtagccagaccccaggtgcctgctctcgtctttctctgggtggcctctgatcttgcaccccgt

SEQ ID NO: 6653 - DNA, 72 bp, Homo sapiens
ggttaaacctgagggtgagcccgaaagaccgctgccgccggcggccaccccagcgcgggtccgctgagaatg

SEQ ID NO: 6654 - DNA, 72 bp, Homo sapiens
tgtcctctcagcccccgagacctgactgttccctccgggcagagccgcctccctggctgcccttccagctgc

SEQ ID NO: 6655 - DNA, 72 bp, Homo sapiens
gttcactggtcggcgcaatgagggaaaacacacagcgtagggaaccacagggcatctcagtaagatgctgtt

SEQ ID NO: 6656 - DNA, 72 bp, Homo sapiens
ttctgcagacggtgcccctttcttgggacgatcaacgtagatgggcaaaccacaccatcttaaatagccttg

SEQ ID NO: 6657 - DNA, 72 bp, Homo sapiens
tggactggaacccttttcattcttgttgcctctgacggtatgggtgcctgcagaagctggagccctttgtca

SEQ ID NO: 6658 - DNA, 72 bp, Homo sapiens
ggtaaagccccaaacacacagaagttgccagttcccgcaggactcaggccttgtgacccagcacccaccttc

SEQ ID NO: 6659 - DNA, 72 bp, Homo sapiens
tcgggaggcagcctgttttgtagcctctgaggctccggggaaaggtttggctgcgtctaagagagacgtttg

SEQ ID NO: 6660 - DNA, 72 bp, Homo sapiens
agggcgccaaatggatatctgacatttgagggaaacggccaccgcagtatctgcaggacaccgcgtgaacta

SEQ ID NO: 6661 - DNA, 72 bp, Homo sapiens
ctgaccaaggctacagccccagaccagaaaagtagcggcggcagggacagctgaccagaccacgggcagggc

SEQ ID NO: 6662 - DNA, 72 bp, Homo sapiens
gcttcaaagattgcataagaatgcacagtcagagccgggcacatggagggctgtcaatgacggtggttccct

SEQ ID NO: 6663 - DNA, 72 bp, Homo sapiens
ttggtgcgaactggcaggacaggtaggggtctcaccgcttagctggggctcagtgtggatcttcttactggc

SEQ ID NO: 6664 - DNA, 72 bp, Homo sapiens
ttttatctccagagcagagaaccttaggagggttacgcaagctgcagaggggcaaggtcccactccaaagtg

SEQ ID NO: 6665 - DNA, 72 bp, Homo sapiens
gattacccagggtcaagtcccagctctggtacctgcggcctttaaaaccacgaaaaaattactttaatctct

SEQ ID NO: 6666 - DNA, 72 bp, Homo sapiens
aaatgaaatataatgttagattgcgagcaaaacctcgaatcagtgtttctgctcatgagtttatgtaaggag

SEQ ID NO: 6667 - DNA, 72 bp, Homo sapiens
cggagctgatgggtggctgtagcctgattagaccgcgtcagtccggagggtgggtcttgggagggggcgcag

SEQ ID NO: 6668 - DNA, 72 bp, Homo sapiens
tccggcagccgccatccaccgccagtttggagagccggacacccgggttcgaatcccggctttgccgctttt

SEQ ID NO: 6669 - DNA, 72 bp, Homo sapiens
acggcgaggccgccgagcagcacctcagagacctgcgtgagttctaaagcctggggctactacaattctgct

SEQ ID NO: 6670 - DNA, 72 bp, Homo sapiens
gagcaataaatagggtgggtgatggacatatgtgacgtttgccacagagaggccgtcagtatgggccttgtg

SEQ ID NO: 6671 - DNA, 72 bp, Homo sapiens
agtttggtcaacttgtgaatgccagttctctaggtcgtcaagggcactgccagttaagactgatcccctaac

SEQ ID NO: 6672 - DNA, 72 bp, Homo sapiens
tcgccccgagcagcctggccagcagcatcccgcctcgcccacttcccagtagacacagggacagcggcttcc

SEQ ID NO: 6673 - DNA, 72 bp, Homo sapiens
tgcgtttttctttttttcctttacgcatgtaaccacggtcctgcatcgtgaaacggtacgcgcgtcggtggc

SEQ ID NO: 6674 - DNA, 72 bp, Homo sapiens
attaaataaacccatgacatttgtagccagcagctcgggtgttttgtagggttttccctgagaagtggggac

SEQ ID NO: 6675 - DNA, 72 bp, Homo sapiens
aaccaataacgcagcgtctcctgcaggaaactcatcgcttgggtcacctgttgctctttgctctaatgagcc

SEQ ID NO: 6676 - DNA, 72 bp, Homo sapiens
ggtgcagcagagctctgagagcagcaccagctccccgtctcaacatgaggccactccaggggcaaggttgct

SEQ ID NO: 6677 - DNA, 72 bp, Homo sapiens
gagaatgattaaatgaatgaggcacaccctcatgacggaagacagaagctgtaaggtaagaaggggacgccc

SEQ ID NO: 6678 - DNA, 72 bp, Homo sapiens
ccggagcttcctgaactgggtaccgatgatgcaggcgaggagtgggcccacgcggcctttgcgcttcagagg

SEQ ID NO: 6679 - DNA, 72 bp, Homo sapiens
aatgggtccgaggacagaagcggccggtggcgggacgcaggggaggcagggtgacggcccgaatctcctcac

SEQ ID NO: 6680 - DNA, 72 bp, Homo sapiens
gaggtcgtggcgcttgcacttcctgtacagctgctcggcgtcctcctgaggaatgaggatgggcaggtgtcg

SEQ ID NO: 6681 - DNA, 72 bp, Homo sapiens
atacttgatacagatgtgagggtgaaatgagctaacgtatgtgaagccctcagcacagtgtctggcataata

SEQ ID NO: 6682 - DNA, 72 bp, Homo sapiens
aatgctgagtgccgtggcctggcactgggaagcgccggtcctcagtccctttccctgctcctgggcatccca

SEQ ID NO: 6683 - DNA, 72 bp, Homo sapiens
gccacgcccacccggaacttgccctagtccgcaagcgcagcgtgcagcctgggttcccgcccgcgcctctcc

SEQ ID NO: 6684 - DNA, 72 bp, Homo sapiens
gtgactcagcactgcatcaataaaacagatcccttcgtccctgaatctgctggatgaaaatgatgtcttcct

SEQ ID NO: 6685 - DNA, 72 bp, Homo sapiens
tctaagaaaaaataatgacacaccagaatgggaaacggctgcagactgtcatagaaatgtcaccaattagct

SEQ ID NO: 6686 - DNA, 72 bp, Homo sapiens
atgtgagtgcctgccctggtgctcatgggtatcagcgggacagagatttgtgctgagctgcgtgctgctggc

SEQ ID NO: 6687 - DNA, 72 bp, Homo sapiens
cgcggggcaggaaaaagcgcctaatccaggctctgcgtcactcccgcaattggttagaaatggagtttcctg

SEQ ID NO: 6688 - DNA, 72 bp, Homo sapiens
gtgtgtatgcgtgtgtgtgtgtgtgtgtgcacgcgcgcgtgtgcgtgttgacttcatggaattttgttttgt

SEQ ID NO: 6689 - DNA, 72 bp, Homo sapiens
ttgtcaaatggtccaaggaaaggggaaaattgccccggttgagaagagcactgctgtaaagtaatgagcctc

SEQ ID NO: 6690 - DNA, 72 bp, Homo sapiens
cagtggggacatagccacctccacatcctgatgggcggcctcaggggcctcccccttcctgctccctacccc

SEQ ID NO: 6691 - DNA, 72 bp, Homo sapiens
ctccccagggaactaaatatgtttgctgcactgtgcgtggagatggagaatgtacaattggctgaccctgtg

SEQ ID NO: 6692 - DNA, 72 bp, Homo sapiens
cagaatgaacccagaaacacaacctgaaccatcaccgtcaccacagagggccatggattctgcacttaattc

SEQ ID NO: 6693 - DNA, 72 bp, Homo sapiens
ttcatatgacactcatcacatgctaacttacttcacggttactgccatttgtcttacattctctacttaaat

SEQ ID NO: 6694 - DNA, 72 bp, Homo sapiens
agtcacatataaacacacttgtgatcattaccaaacgacaggacaagcccagtgcaccccggcgtcccctcc

SEQ ID NO: 6695 - DNA, 72 bp, Homo sapiens
gtggtgcctgcgggatgaaggcagccaccagcgctcgtagcctcctggctcaggcagcgactctgtagacag

SEQ ID NO: 6696 - DNA, 72 bp, Homo sapiens
tgctgtctccaaagcccacactctttcctctgtgccgctccataaatgctacttgttcccctctgtctctgt

SEQ ID NO: 6697 - DNA, 72 bp, Homo sapiens
gttgagcttccctcacgtagagaattgctgcagggcgccctagagcagctctacacagccctggtcaggact

SEQ ID NO: 6698 - DNA, 72 bp, Homo sapiens
ctctggctgctctcaagggccagaaaagggtcagccgtctgttctccatgccccccggcagggctcccggtg

SEQ ID NO: 6699 - DNA, 72 bp, Homo sapiens
cattatggtgatgtctctgggttgctggtgacctgcgtaactattgggaaatctagtttctcaaaactttta

SEQ ID NO: 6700 - DNA, 72 bp, Homo sapiens
aagtcatctgtctagtcactacagagtttcttcctcgccgtgtggtcttatcactaactcagccctgggagg

SEQ ID NO: 6701 - DNA, 72 bp, Homo sapiens
ccccggcgacctgggttgagtggacagacgggacccggcttacccatgggccaagccctgccacttaccgag

SEQ ID NO: 6702 - DNA, 72 bp, Homo sapiens
aggaaatcctgccgctccgccgtcagaatcctctccgcatgtccaccccgtccccaaagtggggccaccctc

SEQ ID NO: 6703 - DNA, 72 bp, Homo sapiens
ctgtttctgtggtttaagctgagccctctggggtacgttgttacggaagcccacgtcagctaatacagcttc

SEQ ID NO: 6704 - DNA, 72 bp, Homo sapiens
ccaaaacagccatttgagaattggttcattgtgcccggtgtcgctcagcccagagaccttcagtttcaccat

SEQ ID NO: 6705 - DNA, 72 bp, Homo sapiens
tactgcaacctgtttcatcagcagggcctctatgacgtgtatcttgtgccgacctcctatctcgtcctgtga

SEQ ID NO: 6706 - DNA, 72 bp, Homo sapiens
ttgcataaacaagtaataagaatcccctgggcagacgggaacccacaaaatgtcttaaatgtaaaggataag

SEQ ID NO: 6707 - DNA, 72 bp, Homo sapiens
ctggggtgctgacacccttgcacaccacccttgtgcgcagcccccagtgctcgcatgctttttgcatagagt

SEQ ID NO: 6708 - DNA, 72 bp, Homo sapiens
ctctggttcctggtgtggagaaccaagtggtcctgcgtggggctgaggaatggggaggaccagaagttcagg

SEQ ID NO: 6709 - DNA, 72 bp, Homo sapiens
gcccacaggagcttcagaagggctcggctggagggcggggcccctgttgcacttgctcactggggactgggg

SEQ ID NO: 6710 - DNA, 72 bp, Homo sapiens
tactttctcatctcagtgaggacggtggggaggctcgtgaccaggaacttcgggaagaggtcctacctgtgt

SEQ ID NO: 6711 - DNA, 72 bp, Homo sapiens
acccttgtgtctgtgtcacttccttcagaaatcgacgtggccgtcctcggaagtacccagtgagcgctccca

SEQ ID NO: 6712 - DNA, 72 bp, Homo sapiens
gtggctgccgcacatgaaaggctggggtcaggccccgcacgggggtgggaagcagggctgtgcgttttgctt

SEQ ID NO: 6713 - DNA, 72 bp, Homo sapiens
cggcagatacgcggcagctgtgcaggggaggctagcgtgtggtggtgggtgggcggggcacacacctggaag

SEQ ID NO: 6714 - DNA, 72 bp, Homo sapiens
cggtgacagggcatgaggtgacaagatggcagagacgaggtaatggaaagatggaaagaccgcatttctcag

SEQ ID NO: 6715 - DNA, 72 bp, Homo sapiens
agctaggtctcggggcgtctgcagggcagagggcgcgcccgctgcgtccccagctcgctgcaggcccaggca

SEQ ID NO: 6716 - DNA, 72 bp, Homo sapiens
gggaactggggctgcgcgcagcgctcgccagccagcgcgagttccaggtgggcgcgggctcagcgggccccg

SEQ ID NO: 6717 - DNA, 72 bp, Homo sapiens
ggcctgtgtgtaagtggtggcaggaaggcaggtcccgccctggggtctggagcttatcttcttcctgtgagc

SEQ ID NO: 6718 - DNA, 72 bp, Homo sapiens
tgcccaagaaggcttctaaaagtgacttaatctttcgctttcattcatggctgaagagaagcagttaaggtg

SEQ ID NO: 6719 - DNA, 72 bp, Homo sapiens
ggacatgaaatggacccttgccacctctcggtgggcggggaagctgggagaggggcctggggagagggggtc

SEQ ID NO: 6720 - DNA, 72 bp, Homo sapiens
ttgattagctcatagctccaggggaagccagaccccgggccctggaaggcaagatgggcccccagtcctccc

SEQ ID NO: 6721 - DNA, 72 bp, Homo sapiens
gaatattcgaaaccccgagcttttacaacataaagcgcatggtgtggccgcggcgagtaatggcgctctggg

SEQ ID NO: 6722 - DNA, 72 bp, Homo sapiens
cctgcctctaccaaaaaaaaaaaaaattagctgggcgtagtggcatgtgcctatagtctactcggattgggc

SEQ ID NO: 6723 - DNA, 72 bp, Homo sapiens
cggttttaaaccccaaagagctgctcgcttcctcacgcagcagggaaactctgctcgctttccctgaggtta

SEQ ID NO: 6724 - DNA, 72 bp, Homo sapiens
gaccaagaactcaatcttaaaatagacatacgattcggacagacattttaccaaagaagttaaacgactggc

SEQ ID NO: 6725 - DNA, 72 bp, Homo sapiens
gttgcactgaggtgaaatgttgaatgtcatgtggacgcaagtaggaacgtaattggtaggttgtgttctcat

SEQ ID NO: 6726 - DNA, 72 bp, Homo sapiens
ggaagagccttcccccgaggccagccaggcagagacgcgggaacataaaacacattccagcggttggcatct

SEQ ID NO: 6727 - DNA, 72 bp, Homo sapiens
gagacagatatggagagagtcacacaactagagggcgcctaaccagtggcaagaactcttctttggcagagt

SEQ ID NO: 6728 - DNA, 72 bp, Homo sapiens
gggacctatgagttaattatatacatacaatgcttcggctaacacaatttagaaagtatttgaagttcagaa

SEQ ID NO: 6729 - DNA, 72 bp, Homo sapiens
accgtgtcccagattttccaaataatcctgccattcggaagcctgttcatagccccaaagtactgaaaggcc

SEQ ID NO: 6730 - DNA, 72 bp, Homo sapiens
cctgagtgagtgtcttcctcacccctcctccatctcggttgccttgctctttgcccatctgcactgctttga

SEQ ID NO: 6731 - DNA, 72 bp, Homo sapiens
agccagactcgctgcagaggcagctgtgctgttcccggagcctggcttcaggggtgcatccgtcactcaggg

SEQ ID NO: 6732 - DNA, 72 bp, Homo sapiens
gtgagtcactcagggcgggatgggtgaggggcgtccgccggtgaggaaaagctcagctgccggagcccaggg

SEQ ID NO: 6733 - DNA, 72 bp, Homo sapiens
gcacgcggtggcggcccaagtgaggcctactaggccgcagaacgcgctccgctccagggcaggagtcctagg

SEQ ID NO: 6734 - DNA, 72 bp, Homo sapiens
aatgaggaaccaaaagcagaagtggccccccaggacgtggttttgtaactgggggagggcttctcgctccct

SEQ ID NO: 6735 - DNA, 72 bp, Homo sapiens
ttaaagtatcttgcttcttccccaaattggtttgccgaggctaagacaatatttaaaagtgtgtacaaatta

SEQ ID NO: 6736 - DNA, 72 bp, Homo sapiens
ttgccattgcacaccagcctgggtgatggaggctccgtctggaggaaaaaaaaaaaaaaaaaacaaaaaagg

SEQ ID NO: 6737 - DNA, 72 bp, Homo sapiens
aagaggggaggggcttccgaggctactcaccacagcggctgggtgtgtccatatctgtccaggagccgttgg

SEQ ID NO: 6738 - DNA, 72 bp, Homo sapiens
ctgcaactaagtcagcaacacagtttctctgatgtcggcctcggctgtgcttcttctttgggggtgaagaga

SEQ ID NO: 6739 - DNA, 72 bp, Homo sapiens
tggtgaacctgttccctggaggaatttacacaccacgggctcacacggccagtgccgatgtgcactgctccc

SEQ ID NO: 6740 - DNA, 72 bp, Homo sapiens
acctgtcaggaaggaatgtgactgccacaatggggcggtgtgtgttctgcccagagccccatccctcgtgag

SEQ ID NO: 6741 - DNA, 72 bp, Homo sapiens
aggcatggatgggagcgctgtttgggcagcctcgccgcggccagggcttaaaaatggaagtcaggaaaattt

SEQ ID NO: 6742 - DNA, 72 bp, Homo sapiens
cagccctgcggctagggcggggagtggaggacccccgggctggctctcggacctggacttggggcttccgac

SEQ ID NO: 6743 - DNA, 72 bp, Homo sapiens
ttgggtggatggatggaagagtgagagagaggctgcggctgccgctgccttttcgggtgttgcttagattaa

SEQ ID NO: 6744 - DNA, 72 bp, Homo sapiens
tgaggctgctgatttgggtctgggaagaacagtcacggcttctgctggccagcggggtggcgggcaccagcc

SEQ ID NO: 6745 - DNA, 72 bp, Homo sapiens
gctgcaaagccgaagccggcgcgcaaaccggctcccgaggcggcagctctgctgcaaccttttaatggggga

SEQ ID NO: 6746 - DNA, 72 bp, Homo sapiens
gattgcgccactgcacttcagcctggatgacagagcgaggtcctgtctcaagaaacaaacaaaaaccatgtt

SEQ ID NO: 6747 - DNA, 72 bp, Homo sapiens
ctgggccacagtctgtggggagcataaggaagtcccgagtagttaaaggctgaacaggaaaactttggcctc

SEQ ID NO: 6748 - DNA, 72 bp, Homo sapiens
ctctctcttttttttgagacggagtcttcctctgtcgtccaggctggagtacagtggcgcaatctcggttca

SEQ ID NO: 6749 - DNA, 72 bp, Homo sapiens
atgggaagtcattggaggctcttgaggagatgatacggaagctgtagagaggttaaatagtttttccaaggt

SEQ ID NO: 6750 - DNA, 72 bp, Homo sapiens
gcttccgcatcttgcttgggttggtgggctcggcccgcactgcctggtactgctcatccgtcaggaccttcc

SEQ ID NO: 6751 - DNA, 72 bp, Homo sapiens
aaggaactcttgtctgtccgttgttgcagagccagcgcatgagaccaagtgtgagtatcaggcagtgcagcc

SEQ ID NO: 6752 - DNA, 72 bp, Homo sapiens
acagcacagtgaagaaacagggtaccttggaataacgaggaccctgccaccagcaagtatttgtcagtcacc

SEQ ID NO: 6753 - DNA, 72 bp, Homo sapiens
cccccaaggctggtttgcccgtgcacacgcacgcacgtgtgcaacacgtagcacttgctgagtgtttgctac

SEQ ID NO: 6754 - DNA, 72 bp, Homo sapiens
acacagaacagccctggactctgggcctctccgtccgagccagctagcagttcatttcaagtgagagaaagg

SEQ ID NO: 6755 - DNA, 72 bp, Homo sapiens
ttcagaatgaagagttgtaagtcgctgacctggggcggactggagggtggggtggggtgggtgttgaggggc

SEQ ID NO: 6756 - DNA, 72 bp, Homo sapiens
caatttcagcttgaaagctctgaaaggagaggggacgtgtgaatggctttttaagtggcatcattaaacctg

SEQ ID NO: 6757 - DNA, 72 bp, Homo sapiens
tatctggttgtaaagtatacttttctccccatctccgccttaccattgcatcacattagaaaagcatccttt

SEQ ID NO: 6758 - DNA, 72 bp, Homo sapiens
gacatccaagctccagactcactgctaagctcccacgtccagccctgtcctcaatgtcccatgcttgggtga

SEQ ID NO: 6759 - DNA, 72 bp, Homo sapiens
ctcaagcggggaaaagcgggcctagagctccagggcgggagcgacgccgacgcctaaaacattcttgaaaaa

SEQ ID NO: 6760 - DNA, 72 bp, Homo sapiens
gtttgagacaccgaaatggggaagttaagtggagacgtcaaaagatggtgtgaatttggagctcgtgggaaa

SEQ ID NO: 6761 - DNA, 72 bp, Homo sapiens
gtaggtccccttgctgggagagagcaggaagctgacggagcttctagctggtgatttcaattttattcatca

SEQ ID NO: 6762 - DNA, 72 bp, Homo sapiens
ttttcagctaatatgcatagctgtctttgttctcacgggctctgaaaggagaagtaaataggaacttcagca

SEQ ID NO: 6763 - DNA, 72 bp, Homo sapiens
tctacaaaaatctcagccttctgatcctcgggacacgactagcaatccaacaactttgaactagcaatttca

SEQ ID NO: 6764 - DNA, 72 bp, Homo sapiens
gggcggccacatgcttaaggtgccagtgaaaaaaccgacagccagaattctacagccaggaaagatgtcctc

SEQ ID NO: 6765 - DNA, 72 bp, Homo sapiens
cttgtcacaaaccatggtttgaccctgaagctgggcgggcagagcagtgtactagtgtaccagctctgttct

SEQ ID NO: 6766 - DNA, 72 bp, Homo sapiens
cctgccccgagggctccagcgaaaaacgatgcaggcgccctccggaagccataatacatcatctggtctttg

SEQ ID NO: 6767 - DNA, 72 bp, Homo sapiens
cttcctgcttggggttcccctaagggaacggcttccgccacaggagacccagccaggacaatcgtgtgcttg

SEQ ID NO: 6768 - DNA, 72 bp, Homo sapiens
gaaaatggagtgtcctggccgggcgcgggggctcacgcctgtaatctcagcactttgcgaggccgaggcggg

SEQ ID NO: 6769 - DNA, 72 bp, Homo sapiens
aacttccagttggtaatggagcccctctgagctgtcgatcctgctcgcaccgtgccatagatcaacctattc

SEQ ID NO: 6770 - DNA, 72 bp, Homo sapiens
tctgatagctattaagtggtgagtcagacattgcacgtgcttaagaccaatggtaataaactggccctgtgc

SEQ ID NO: 6771 - DNA, 72 bp, Homo sapiens
aacaaagtgggaagccgtcaccactgtagacctgccgcccccgcgggaggaatgggagcctggttttgagct

SEQ ID NO: 6772 - DNA, 72 bp, Homo sapiens
tcaagtttttgcaaaattcttacataaccgtctgccgtttttatagggcagtgtttctgagccgggtgctct

SEQ ID NO: 6773 - DNA, 72 bp, Homo sapiens
cccggggcttgtgggccagccagctactcccagtgcggggcttgccgagcccacgcccacccagaactcagg

SEQ ID NO: 6774 - DNA, 72 bp, Homo sapiens
cggctcactgcagccttgaccttctgggctcaagacgaagaaattggggattggcttaagtaattgcccaag

SEQ ID NO: 6775 - DNA, 72 bp, Homo sapiens
ctgattcacaagttggagtgagaccttttttcctccgtattttcccttttatgaattccatcttaaaagaaa

SEQ ID NO: 6776 - DNA, 72 bp, Homo sapiens
atccccgggagcctgcttcctccaatgcacagagccgtggcgcgtgtcaaagtgtgggaaagttcctgggag

SEQ ID NO: 6777 - DNA, 72 bp, Homo sapiens
atgctacttcctttctaggacctgtccaaaaactacgttaggcaataaactacattattactcttgggtcag

SEQ ID NO: 6778 - DNA, 72 bp, Homo sapiens
cagcagaaacaaaacaattcataaaattacagaggcggtattcggaagttctaaatacttttttttccatct

SEQ ID NO: 6779 - DNA, 72 bp, Homo sapiens
tctggggaaacagtgaacaaggtagttatgttacccgtccacatggaaactaaaataatagaaaatacttaa

SEQ ID NO: 6780 - DNA, 72 bp, Homo sapiens
acctctttagagcagccatccttggagttgctcaacgccctcttctcttctccctctgaaccacagcttggc

SEQ ID NO: 6781 - DNA, 72 bp, Homo sapiens
gctggcagtggaatggacgttgcaggcggaactaacgtcgctgctgcgttttgcaatcgcgccccgcgcatg

SEQ ID NO: 6782 - DNA, 72 bp, Homo sapiens
ctttttggaggaattctcttaatgggaaccgcaggcgtttctccttcacacccagggctttcccaagttccc

SEQ ID NO: 6783 - DNA, 72 bp, Homo sapiens
cataacccaggtgaattttcaacaagtctttcattcgagaagatatcattagattacttttttttttttttt

SEQ ID NO: 6784 - DNA, 72 bp, Homo sapiens
ggctgttgtaagaatgtgatcttgacggtgatagccgagtgacaaggaatttacatcccagacagtgggaac

SEQ ID NO: 6785 - DNA, 72 bp, Homo sapiens
ggctgctgtctccccccaggtgagaagcttgactacaagacctgtgaggccctggaagaggtcttcaagagg

SEQ ID NO: 6786 - DNA, 72 bp, Homo sapiens
ctggtgcgcagcctgaaccaggcgttcaagacctacgccgtcctgccggtgaggcccgggccaggaggggag

SEQ ID NO: 6787 - DNA, 72 bp, Homo sapiens
tatcacagctgaaatgtgagtttttattccaccaccgtgtgctgcaccctgtgatgcaagtgaaccattgga

SEQ ID NO: 6788 - DNA, 72 bp, Homo sapiens
atctgtatagagagtgcttactgaagctccaggctcgccaggctcaccagggggaccttggaagccttgggg

SEQ ID NO: 6789 - DNA, 72 bp, Homo sapiens
cctcctgagctttagacagtgcctgatggtctggccgtccagaggtgaacttgttctcaggaaggcaggggc

SEQ ID NO: 6790 - DNA, 72 bp, Homo sapiens
gaatcattcagacatgcaaagagactcctgcaggacggtagtcgaggggagagttctctactgctttctgct

SEQ ID NO: 6791 - DNA, 72 bp, Homo sapiens
atgttatcagccttcccagggttatacgtgcagcacggtagttcttaggcattatattgattgcaaagaagg

SEQ ID NO: 6792 - DNA, 72 bp, Homo sapiens
gaagcagggagcgggagcgccgcggcgggccctcgcggggtctgctcccagttctgccacttttctggagct

SEQ ID NO: 6793 - DNA, 72 bp, Homo sapiens
tctgcagcagcggccctcctgccgccgtctccacgcgcccttcccagacctgttcagtttcccagcagcggg

SEQ ID NO: 6794 - DNA, 72 bp, Homo sapiens
agagaatgaaatctaggagatgattgcaccgtccccgcccctcaacatgaaggatgccccactgcccatcgg

SEQ ID NO: 6795 - DNA, 72 bp, Homo sapiens
gggaagaggctgtgcttttcctctgagaaagatgacgttgcactttcatattgaggaaaccgcttgtggttg

SEQ ID NO: 6796 - DNA, 72 bp, Homo sapiens
ggtagggccttctccctgggtagcgctttcctcttcggtctgggcaaatttcccactagcccttggaagaaa

SEQ ID NO: 6797 - DNA, 72 bp, Homo sapiens
gtgcaggaatgtgctgggaggaagtcagacagccgcgagatgaagagttggccagggcctgatttcccatta

SEQ ID NO: 6798 - DNA, 72 bp, Homo sapiens
tgtgaaagttaaatattttcctttcatcaagctttcgtatttgaaatcacattgcaatttgggttatagaat

SEQ ID NO: 6799 - DNA, 72 bp, Homo sapiens
agagcattctctgttggttgcagatgaagaatctccggtttaggtcccaaggggagcaggcttttaaactca

SEQ ID NO: 6800 - DNA, 72 bp, Homo sapiens
ttcccagtagacacagggacagcggcttccactcccgggacctctggacatcctccatcccggtttggcggg

SEQ ID NO: 6801 - DNA, 72 bp, Homo sapiens
atacacatcactctcacgcacattcaattggccaccgcttctagcctccagagggcaggaaactgccaccct

SEQ ID NO: 6802 - DNA, 72 bp, Homo sapiens
ctgccctaggccaccgttggagcagggggtaggcccggccaagaggctcacctgagatccagttgccggggt

SEQ ID NO: 6803 - DNA, 72 bp, Homo sapiens
gaacctggcacttccaggggctctttcacctgagccgtatttcctgtgtctttctctggtcaatgaagacag

SEQ ID NO: 6804 - DNA, 72 bp, Homo sapiens
attggcctctgctggggcctcctatgggtgtcttacgtctgtccatccatctgtccgtggtcagaagtgggg

SEQ ID NO: 6805 - DNA, 72 bp, Homo sapiens
cctgactctaaagccacaaggtcccacggggccaccgtgccttcctctctcagcctggtaactgtaaaccca

SEQ ID NO: 6806 - DNA, 72 bp, Homo sapiens
tgtaggaccttgctcaaggccaccaggcaaattcccggcagagacagggctggaagccagacccctcctgac

SEQ ID NO: 6807 - DNA, 72 bp, Homo sapiens
gagctaggcagttgcccaaggggacacagcagtgacggctctgggacgaagcccaggtgtccagacgcgatg

SEQ ID NO: 6808 - DNA, 72 bp, Homo sapiens
tgtccggccctacctctacctcatgtggtctctgacgggcattcattgggcacctgctgtatacccggaaag

SEQ ID NO: 6809 - DNA, 72 bp, Homo sapiens
gcattcgtacagcagtctcagctggaaaacaagaccgggtagcggcctccttgtatcagaaggtattgcgta

SEQ ID NO: 6810 - DNA, 72 bp, Homo sapiens
ttgtagctgaggcgaacggggcgaggctgtgaggacgggttttggagcgccgctcggccgtcctcaaaactt

SEQ ID NO: 6811 - DNA, 72 bp, Homo sapiens
tcattgtgaaacctttttgctggatgtgttacatgcgatgagcttgggtgttataataaacagagaggaagg

SEQ ID NO: 6812 - DNA, 72 bp, Homo sapiens
ataaagcctccaataccatacacatagcgtgtgtgcgtgcacacattcgcacacagcatgtgtagtggtcta

SEQ ID NO: 6813 - DNA, 72 bp, Homo sapiens
taggttcaggcagctgtaacaaaataccacagactcggtggcataacaacaaacgtctatttctcacagttg

SEQ ID NO: 6814 - DNA, 72 bp, Homo sapiens
tggtctatgtacaagtccttcagctttccccgtcacgtagaggctcaagtccttatctgtgaacattcattc

SEQ ID NO: 6815 - DNA, 72 bp, Homo sapiens
ccaaaagcaagtggttaacatgtgcaagccagcaacggtctgatcagaatgttcattatttcagtcactaaa

SEQ ID NO: 6816 - DNA, 72 bp, Homo sapiens
aggcaagaagaatgggagggaggaaggacagggagcgggaaggaggaaggcaggccatcaccagtatacacc

SEQ ID NO: 6817 - DNA, 72 bp, Homo sapiens
ccatggacactcaattcaacccaaaccacacaacacgcatagagaacaaggtggagaacacggtcccagatc

SEQ ID NO: 6818 - DNA, 72 bp, Homo sapiens
actggcgcagaacccatcaccgcttgcccttcacgcgcttcattgggagtgcagcccccaccccgagcgcac

SEQ ID NO: 6819 - DNA, 72 bp, Homo sapiens
gagccatccccgacccgtgttcttttcccgtgacccgggtaaccatcttgggaggctctaacaccctaggcg

SEQ ID NO: 6820 - DNA, 72 bp, Homo sapiens
tcatttagtcatttgataaacagaaactctggctgcgtgaaagagttaatgttatttctgcaatcctggcag

SEQ ID NO: 6821 - DNA, 72 bp, Homo sapiens
tgtaggcctgggggcacccggggcgggggggtggtcgccgaactctgtgcgatcactggaggaagggactgg

SEQ ID NO: 6822 - DNA, 72 bp, Homo sapiens
ggatttacagaagcaggatgtaatgaaccaccaggcgtgcaccacaggcccctggcgtgtctttctcagctg

SEQ ID NO: 6823 - DNA, 72 bp, Homo sapiens
atagtccctgaccacagctctttggtttcagctcccgcggtctctcagctggtcaactctgaggaagctggg

SEQ ID NO: 6824 - DNA, 72 bp, Homo sapiens
acagggaagatgagggtcagacctggaggctgggacgccgggaatctgacagagcaccccctgtgatcaccc

SEQ ID NO: 6825 - DNA, 72 bp, Homo sapiens
agagagttgttatcagcggtggagtctttcgaaagcgctggtttccgttaagctcttagccaagaaaaccta

SEQ ID NO: 6826 - DNA, 72 bp, Homo sapiens
cagccttggcaagtagctccagaaactgctagtgacgttgtcttcaagttaaatctcaggaggaaaagaaaa

SEQ ID NO: 6827 - DNA, 72 bp, Homo sapiens
tgtgtccactgtcagctgggccttgggcttttcaccgtaagcctctgcctggccaaaaacaaatgtacatac

SEQ ID NO: 6828 - DNA, 72 bp, Homo sapiens
tcttgggcaaccctgggctgagaagagcctggaagcggtttcagcaccaagttcctctttacctaaaagggc

SEQ ID NO: 6829 - DNA, 72 bp, Homo sapiens
aagacaatgagcaggaacagtgggaaccctcgggacgcagaagttcagggcaaatgcctaggcacaccctgg

SEQ ID NO: 6830 - DNA, 72 bp, Homo sapiens
cccagcctactgcaggttgtttctcccagcaggctcgaacccaagccaaggccttcaacacgcccaggcact

SEQ ID NO: 6831 - DNA, 72 bp, Homo sapiens
acacatccctgcacatgtgcacacagctgtggccgcgaggacatcctcagacagacggcctgggtcacaccg

SEQ ID NO: 6832 - DNA, 72 bp, Homo sapiens
gttgagtgtccgtggtcaggtgtgtgtaagagacgcgcagagaattccacgccgtcccaacctcccagccgg

SEQ ID NO: 6833 - DNA, 72 bp, Homo sapiens
aatcatgaggctcaagttgaatttttttttttaatcgggggaaaccaaaatatatttggcaaaaaggaaatt

SEQ ID NO: 6834 - DNA, 72 bp, Homo sapiens
ctttttctgtgggtttttatcttttatttttcccccgtaaggaaactcaaataaagggaaatttgttctaag

SEQ ID NO: 6835 - DNA, 72 bp, Homo sapiens
agatgtgttaatataccacaatccaggcagctgaacgcttgaccaaactttagtcatctaggaggaatgtca

SEQ ID NO: 6836 - DNA, 72 bp, Homo sapiens
aattatttatcataacaaggacaggaataacctgtcgatataaaaagaaacccaaggaaaatccccaaatct

SEQ ID NO: 6837 - DNA, 72 bp, Homo sapiens
gacgggtttcgcaatgatccttatgttctggtccccgcagtgggctgggagcttcaggagagtggagaccct

SEQ ID NO: 6838 - DNA, 72 bp, Homo sapiens
aaagtatatgttattaataaaacctacatggttgtcgtacccatggggaaggtgacaggggaggaaaacaga

SEQ ID NO: 6839 - DNA, 72 bp, Homo sapiens
catctgcagactaggatcccaggcccaaacttgcacgtgagatttgttgaaacttaggtcatttggtactcc

SEQ ID NO: 6840 - DNA, 72 bp, Homo sapiens
tctcactcaacgccaggaacaggtccaaggcgaagcgggtgtttgctgagctcagctgctccatggtgaaaa

SEQ ID NO: 6841 - DNA, 72 bp, Homo sapiens
gtaaggggatgatggcagcggcgggcggtccgaagcggcctctgccagggcccccgctgcggtggggtgcgg

SEQ ID NO: 6842 - DNA, 72 bp, Homo sapiens
atgggggcggttcccgtaggatcaccaggtgggttcgcgtgcccagattgactgcttgtgggtggcatggcc

SEQ ID NO: 6843 - DNA, 72 bp, Homo sapiens
aaatgaatttcatttttggcatggtgtggaaggctcgggagagaggtctaggcaccagatgtcaacgtgagg

SEQ ID NO: 6844 - DNA, 72 bp, Homo sapiens
tccagcatagcgcacagggcgggcccagagaaaggcgggcccattgttgggggattcggcttccggaggagg

SEQ ID NO: 6845 - DNA, 72 bp, Homo sapiens
tcccgggtgggtaactgtttctcttttcctagacacgggacaacgctgagtcagaatgcttagtttgatcaa

SEQ ID NO: 6846 - DNA, 72 bp, Homo sapiens
cagaggctcatctgccgagtagagctgctggggctcggggactcagggcacacaggcggaggagggcggggc

SEQ ID NO: 6847 - DNA, 72 bp, Homo sapiens
cctggaagtgggcgggggttagcagggctcagctgcgctcccccagcctaccaaggtctctcagggcacaag

SEQ ID NO: 6848 - DNA, 72 bp, Homo sapiens
ctttctctggggtcagcctgaggctggaagaggcccgtggcccaccgggcatcaggccaagcctggagctga

SEQ ID NO: 6849 - DNA, 72 bp, Homo sapiens
cccgtgaaataagccagtcagaaaaagacagctcccgcaggtccactcgcaagagggccctggagccgtcag

SEQ ID NO: 6850 - DNA, 72 bp, Homo sapiens
cccacgtacgtgcaccgtgtatctgggcatggctccgctgcagcctgaggtcctcagctggtcacaggaggg

SEQ ID NO: 6851 - DNA, 72 bp, Homo sapiens
gctcacacccactgcccacctctcctcctggcgctcgagtcccttgcctcattccttgggctgtctctggca

SEQ ID NO: 6852 - DNA, 72 bp, Homo sapiens
ttcagtaggtgctgaaggccacgagccattttagccggtgcatatggggaagggagacaatcatgacatggg

SEQ ID NO: 6853 - DNA, 72 bp, Homo sapiens
gtagcattttgttgctaggtgtctgcaataagagacgaaactgaactgctttgccggaaacaagtgaaatga

SEQ ID NO: 6854 - DNA, 72 bp, Homo sapiens
ctttttattggcttcagtggaactggaaggcgggacggcgagtgcgggagaaggtctccattggccgaccgc

SEQ ID NO: 6855 - DNA, 72 bp, Homo sapiens
gatgctgaaacgtaaggacacgtctgcagggaatccggggaaagacacttcctccttgatgaagggaggcaa

SEQ ID NO: 6856 - DNA, 72 bp, Homo sapiens
cacaccaggaagtgaacaatgatctcctctggcctcgcccagctggctctggtttcctaatccccggtcctc

SEQ ID NO: 6857 - DNA, 72 bp, Homo sapiens
gggtggaggggtgatgggggtgggggggtggggggcggagggtgtctctcgggtggcctggagcaccagcag

SEQ ID NO: 6858 - DNA, 72 bp, Homo sapiens
cctgcttctctctacacgtgactcaccgcggacatcgaccaagtcatcgcgctctgccactgcgcctgtgtc

SEQ ID NO: 6859 - DNA, 72 bp, Homo sapiens
gggactgtggtctagttgtccacgatggcaacacacggtgaatgctttgcttcccctccctgtcttacttcc

SEQ ID NO: 6860 - DNA, 72 bp, Homo sapiens
cctgtgcaccagctccaactgctgctgagggctcccgggacagctacaaggcaccacaatgacctagaggct

SEQ ID NO: 6861 - DNA, 72 bp, Homo sapiens
aattctttgttgtttctcaagacaagctccttttccggaaattatgttagatttaagcagtgagatttgcag

SEQ ID NO: 6862 - DNA, 72 bp, Homo sapiens
gcgggaggcaagctggcctcgtggccagggagactcgggagatcctatcggccgggcctggcagggcgaggt

SEQ ID NO: 6863 - DNA, 72 bp, Homo sapiens
agccataaagacagctaatttcgtggctgtggacacggtgagagttgggaaacaaggagggcaggtggttgt

SEQ ID NO: 6864 - DNA, 72 bp, Homo sapiens
aggatgatgcctgtgcaaacggcgcggcacccacacggaaggtggcagctaggccgttgaggcaactgtgga

SEQ ID NO: 6865 - DNA, 72 bp, Homo sapiens
gcacctgcccaagcttctggcctagaagaggcacacgtggcagaaatacaagcagacggcagaataaatagc

SEQ ID NO: 6866 - DNA, 72 bp, Homo sapiens
tctgtctttaaagcggatgtagagcgcgttctaaccgttccctaaccattgtgtcaccgcgaaaggccgggg

SEQ ID NO: 6867 - DNA, 72 bp, Homo sapiens
ccagatgcccagctctggattgcgaaaggggggcccgggcagaggtaatgtattaactctcactaggacagt

SEQ ID NO: 6868 - DNA, 72 bp, Homo sapiens
ttgcgcagtgagtgcccgacacagctgcatgtggccggtatcacagggccctgggtaaactgaggcaggcga

SEQ ID NO: 6869 - DNA, 72 bp, Homo sapiens
ctggtaaaagacaagcacaaagagtcattcacacacgtgacaatgggcccattctagccacttcccctttca

SEQ ID NO: 6870 - DNA, 72 bp, Homo sapiens
tttccctacagctttttctatgagcctatctcacacgtctctaccttctttcctgtttcctttccgttattt

SEQ ID NO: 6871 - DNA, 72 bp, Homo sapiens
acgatctgatgaatcatagcaaacacacatggctccggcgggggacagcccttcctcatgttgctgtggaaa

SEQ ID NO: 6872 - DNA, 72 bp, Homo sapiens
gcagcgccattgtgctccccgggcgggcatgtgctcgcgctccgtggctctgttggtgcccagcgtgcgggg

SEQ ID NO: 6873 - DNA, 72 bp, Homo sapiens
gtttcatagtctcctgtaacaggaagtctcctagtcgtacgaaactgctacgtgatacccggatggcctctt

SEQ ID NO: 6874 - DNA, 72 bp, Homo sapiens
cacttgctgcccctaccgcgttccgtgaccacaggcgctcggaatgccggagcaagcctgactgtgctcact

SEQ ID NO: 6875 - DNA, 72 bp, Homo sapiens
ggaggaggaaactgaggcacagaggagactggacacggacagacccctccagagcggggagaacgcatcccc

SEQ ID NO: 6876 - DNA, 72 bp, Homo sapiens
tttatttttgctaggccgctaaggacgctagaaagcgattcgaaactcccgctttttccatagagatgcttt

SEQ ID NO: 6877 - DNA, 72 bp, Homo sapiens
ctgtagtgtggacctcccccgcacatgcgatacctcgggccgggcggtgtgacctcacaggcccacttatgg

SEQ ID NO: 6878 - DNA, 72 bp, Homo sapiens
aatagcaacagtggcacttctcctgaggcatctatcgtacattgccttgttatttgtgtacatattttaaaa

SEQ ID NO: 6879 - DNA, 72 bp, Homo sapiens
cccaccgtcctggtccctggcgccctgcccagggacggcctctcacctgcatgagctctgcagctggctgct

SEQ ID NO: 6880 - DNA, 72 bp, Homo sapiens
aggacgcatcacagatgaaaacagcatctggaagccgactccttacagaagcctgagcccacgcaggacctg

SEQ ID NO: 6881 - DNA, 72 bp, Homo sapiens
ggaaacagggagagagatggaaggaggtgagactacggaaggatacacaggaaatgacgaaattagccataa

SEQ ID NO: 6882 - DNA, 72 bp, Homo sapiens
ctggtttcctctcctggctcctgagagggccacctcggctgttccctctggaggacagagcccgactctgtc

SEQ ID NO: 6883 - DNA, 72 bp, Homo sapiens
cccctggtgatgctggaggaggtaccggggaggagcgtgtgtggccccggcctctcactagcagcggcggct

SEQ ID NO: 6884 - DNA, 72 bp, Homo sapiens
agagggggatttgcgtttgggggtcagcatatcctcgcactctcccaacattcggggaagggcgtgccttca

SEQ ID NO: 6885 - DNA, 72 bp, Homo sapiens
ccccagactggaggagatttcagggacgtgaccaccgaacgcagtgcgagtccctgggctgaatccgggact

SEQ ID NO: 6886 - DNA, 72 bp, Homo sapiens
gtcagttcatgaaccgtgtagttatatggagaccccgccctggaggccttagctgccagggttacaagtagg

SEQ ID NO: 6887 - DNA, 72 bp, Homo sapiens
ccagcccatccacccgggggcaagacggaactcctcgtctactcaccgctgccgcaaggctgggccaagtta

SEQ ID NO: 6888 - DNA, 72 bp, Homo sapiens
aaacagctgaggttcctctaatcactgcactcctacgggcttttctgtaggccggagaaacaagcaccgggg

SEQ ID NO: 6889 - DNA, 72 bp, Homo sapiens
ctggggtaaccctcgaacattaggaaagaccccaccggaggaaagggactcacaagttaatgattacagtga

SEQ ID NO: 6890 - DNA, 72 bp, Homo sapiens
atgcattgtgcaagagcagaggggaggggcagagccgatggggcaagcagcacatcaggactcagcttcggc

SEQ ID NO: 6891 - DNA, 72 bp, Homo sapiens
aaaattgctctaagtaggccgggcacagtggctgacgcatgtaatcccagtactttaggaggccggggtggg

SEQ ID NO: 6892 - DNA, 72 bp, Homo sapiens
aaaaacatttcgtcaccccaaaaggaaatcccagacgcattagctctgccgttcctcactcccccaccttcc

SEQ ID NO: 6893 - DNA, 72 bp, Homo sapiens
gaagtctccttgcatttcctgtgaatttgtcctctcggatttcagagaaacccaagtcaggtgcaggccctg

SEQ ID NO: 6894 - DNA, 72 bp, Homo sapiens
ctactgtttcctttaatccctctacttccttataacgtattaccacccctattttatagacaaggaaactga

SEQ ID NO: 6895 - DNA, 72 bp, Homo sapiens
acagcaggggctggcaggtggtgacctctgctcctcgacctgggatgctccaggttgagacgtagggtagct

SEQ ID NO: 6896 - DNA, 72 bp, Homo sapiens
gaccctgtcccttcctgctacagagtgagcggaaacgcttcatccaatccaggaggcttcagcaaaataaaa

SEQ ID NO: 6897 - DNA, 72 bp, Homo sapiens
caaggcttgtggctgtgggagcgtcccattgtggtcgtggtagtgatggtcacggttgaggtagaaccgcag

SEQ ID NO: 6898 - DNA, 72 bp, Homo sapiens
cgtttgtgtcagtaatgggaaatctgcaagctagacggaaatgacctgctagtgattgcgctgtaaagaagc

SEQ ID NO: 6899 - DNA, 72 bp, Homo sapiens
tcattatcgctgttctttgttcggggttgctgggccgcagagctctctgatgagatggcccatcattccctc

SEQ ID NO: 6900 - DNA, 72 bp, Homo sapiens
gcatggcgaaagtgtgccggcagtgctagggaacccggcaccccctccgcagctgctggcacgggtgctaag

SEQ ID NO: 6901 - DNA, 72 bp, Homo sapiens
aaatgttgacaattggaaaaaaaaaaggtgaattacgtaaaatgagagtgcacatgcctgcacaatctgaat

SEQ ID NO: 6902 - DNA, 72 bp, Homo sapiens
tggaatggaagggagctggttccgagtgctcagcacgctaagctgggaacccagccagacgcaggctttgaa

SEQ ID NO: 6903 - DNA, 72 bp, Homo sapiens
cacagcgccccctggtgctcgctgcggaacacgtgcggctgcagcagctccagcaggcccagcacgtgcagg

SEQ ID NO: 6904 - DNA, 72 bp, Homo sapiens
gcttgagaactccaagttcccagcatgatgcttggcgtttgaatgctactttcttccccttcctcacttcct

SEQ ID NO: 6905 - DNA, 72 bp, Homo sapiens
cccctgccacagttggcagggggccttgcctgtggcgttgcagctgagcacacgcaatcattaaccttttct

SEQ ID NO: 6906 - DNA, 72 bp, Homo sapiens
tgcagaagccatttcaggagtacctggaggctcaacggcagaagcttcaccacaaaagcgaaatgggcacac

SEQ ID NO: 6907 - DNA, 72 bp, Homo sapiens
gcctagctatgggctgattgtttctaaagaggtagcgccacaggggtgtggagccaagtgataatcaggctc

SEQ ID NO: 6908 - DNA, 72 bp, Homo sapiens
ttgtctctgtggctgctctggcctcacccagctcccgggctcacacccccttgctcccaccatagagaccgc

SEQ ID NO: 6909 - DNA, 72 bp, Homo sapiens
agttcctttcaactatttacatagaataagccctccgaacgtgaggatgaattattgttcaacctatccaca

SEQ ID NO: 6910 - DNA, 72 bp, Homo sapiens
cagagtccaggaaatctggtgacactattcttattcgtggtttggcagattcagagatggtggcagcttggg

SEQ ID NO: 6911 - DNA, 72 bp, Homo sapiens
tttaaaaaaaaaaaaaaaatcctgaagagacgattcgtttttgaagaatacatttgtgagaagatcccaggc

SEQ ID NO: 6912 - DNA, 72 bp, Homo sapiens
ttttaacgccattgtctgtgactctaatggtgtcacggctcagggtttagattttgtggttacattctattc

SEQ ID NO: 6913 - DNA, 72 bp, Homo sapiens
tattcaataattgcatattcgcggtcccatttacacgaggagagtcacattgagtaattaaaaatcacaaag

SEQ ID NO: 6914 - DNA, 72 bp, Homo sapiens
ccccccaggcccaggtacgtgtgtatgagccccgtcgggactgctggctttcgctaccctccatgcccacac

SEQ ID NO: 6915 - DNA, 72 bp, Homo sapiens
aaaaccccaagtccctttaaacagttaaccctgagcgtggctggggctgtggtaactaaagacccattttct

SEQ ID NO: 6916 - DNA, 72 bp, Homo sapiens
tccctcttccttatataggatccggcacaaggggacggcaccccccttcctgcttggcctccctcccccact

SEQ ID NO: 6917 - DNA, 72 bp, Homo sapiens
gggccatagggccccgcggaggaggccccagcaggcggaccaggaggccgaagcctcccgacgctcccagcc

SEQ ID NO: 6918 - DNA, 72 bp, Homo sapiens
ggcaaacacttctggccgtgtgggccacagggtgccggtcacagctgctggctcgggctgcctgggtggagg

SEQ ID NO: 6919 - DNA, 72 bp, Homo sapiens
tagcagcctctcggctgagcgggagaccacacactcggaccacacagcgccagctgaactccctcgcacgca

SEQ ID NO: 6920 - DNA, 72 bp, Homo sapiens
atttctaaaggactgttctgcttccaaaccattaccgtaaaagcaatttttaacctcttccctcaaattagt

SEQ ID NO: 6921 - DNA, 72 bp, Homo sapiens
aggagagaaagtgcagtttcggtgagtggaggagccggcagcatctccaggcatttccatgtggggggcacg

SEQ ID NO: 6922 - DNA, 72 bp, Homo sapiens
ctgctctgacctggcctgggtggggtgcggcgggtcgggttagcggggaagccgagtcctccggggcctggc

SEQ ID NO: 6923 - DNA, 72 bp, Homo sapiens
ggaagtcactgtatggagtgtagaagtttggggatcgtttatagagaaatagtttagggaagcttaacagaa

SEQ ID NO: 6924 - DNA, 72 bp, Homo sapiens
tcagatacaactttggcttgcctgtcacaccatcccgtctgttctctaactccctgaagaggtttcccttct

SEQ ID NO: 6925 - DNA, 72 bp, Homo sapiens
acgcagggccctgggttcaagaaggcagacatcgacgagctgagtgctccccaggaggcgaccaggacagca

SEQ ID NO: 6926 - DNA, 72 bp, Homo sapiens
ctgaataatttgtggtgaggttcacatgccaaccccgtgttacaactcccccaccctgttggtgtctggaga

SEQ ID NO: 6927 - DNA, 72 bp, Homo sapiens
cgtgtcctgggcccagcgctgaagctcggctacggcgtgtcttgaccctgcctcccctcctcgcctgagcca

SEQ ID NO: 6928 - DNA, 72 bp, Homo sapiens
tcccgggatctctcctcggctagagcccaggccagcgcgcgagccgctctttgtggcagagcatcctctttt

SEQ ID NO: 6929 - DNA, 72 bp, Homo sapiens
gggccaggcttggcagagagggaagcgggaggacacgaccccagggcattgtgggaacactggccaggctgg

SEQ ID NO: 6930 - DNA, 72 bp, Homo sapiens
tgttaaggtgtgactggtgctgctggaggaatacccggatgaggaagtgtgcatgtgtgcctgtgcacactc

SEQ ID NO: 6931 - DNA, 72 bp, Homo sapiens
tcctcaggttactcaggaaaatgctccagcatgtgcgagcacatgacctgaggttgcatcatagcaccaaag

SEQ ID NO: 6932 - DNA, 72 bp, Homo sapiens
gtgacagcagaacagcgtggtcccaggctcaccgccgacaccacatccgaggagacaccgaggtgctccgtg

SEQ ID NO: 6933 - DNA, 72 bp, Homo sapiens
gaagcacaccgccagtgcgaatgcagtgttcctcccgtcctgctccctacccatcatctccctccctcctgc

SEQ ID NO: 6934 - DNA, 72 bp, Homo sapiens
ccaccacggccggctaatttttgtattattagagacgaggtttcaccatattggccagtaggtctcgaactt

SEQ ID NO: 6935 - DNA, 72 bp, Homo sapiens
gacgtcttttcgccaaaggggctcatgtcaaagggcggaaggtcttcatgtctgggagctaatgtgagtgca

SEQ ID NO: 6936 - DNA, 72 bp, Homo sapiens
atttacttctgttctgtttttgtttatacaagagacggtctggcctggtcatttctcgtcttggtatgttac

SEQ ID NO: 6937 - DNA, 72 bp, Homo sapiens
cgcggccagagtgggcgccaagggcgaggaggcaccgagagcgagcgagagctgccagcaggctgtcacctc

SEQ ID NO: 6938 - DNA, 72 bp, Homo sapiens
ctcctgcctctctccctcgaggcccacggggtgcacggcttcctgcaggaccaggcctggaggcctacccct

SEQ ID NO: 6939 - DNA, 72 bp, Homo sapiens
tccctgggcctcaggttccttaagagcacatgtctcgtggtcactcctgatgaaggcagtgatcacgtggca

SEQ ID NO: 6940 - DNA, 72 bp, Homo sapiens
ccccttcttcctcaggacatcccgggagccaaatacgacggccagcactgcccgacccgtgcgtccttttcc

SEQ ID NO: 6941 - DNA, 72 bp, Homo sapiens
tgatgcctcaaagagctattcaatccaaaggctctcgacggattttctaggcatgcctcgcagatcctcttt

SEQ ID NO: 6942 - DNA, 72 bp, Homo sapiens
cgtgtgtcgtggagtctcctcactgctccacccaacgccaaaatgggtgtttgcgattggaaaatgtcactt

SEQ ID NO: 6943 - DNA, 72 bp, Homo sapiens
ctctcagccaaaaaaaaaaaaaaaaagaagtgaagcggggaaaaaaacaacagaataaaccaaacaaataag

SEQ ID NO: 6944 - DNA, 72 bp, Homo sapiens
cacaaatatttgatgacactgactgtgaggtttgtcgaaagaaaagaggatgagctaatcatgggtaagaat

SEQ ID NO: 6945 - DNA, 72 bp, Homo sapiens
gtttctacaaagaggctttgcttccaaagtgcagccgttttccctcagtgtgagtgagtgtgtgtgtgtgtg

SEQ ID NO: 6946 - DNA, 72 bp, Homo sapiens
cccaacaccgcggcggtgggcgaggccagcggccccgccccgttccctggcgctgccgttcactggcgtttc

SEQ ID NO: 6947 - DNA, 72 bp, Homo sapiens
gtctttgattgcttccaggtgttcctcagcaccaccggagggggatgggtgatcagccgaatctttgactcg

SEQ ID NO: 6948 - DNA, 72 bp, Homo sapiens
cggcagccttgatgctacttctccgaacgccaggacgcacatcccagcctgctttctaccaccaccccacac

SEQ ID NO: 6949 - DNA, 72 bp, Homo sapiens
aaagaaatcccgcaatttgctctaggagctgcccgcgcctttgacattcaggaacccgaagtccctagaccc

SEQ ID NO: 6950 - DNA, 72 bp, Homo sapiens
cctgtgttgtcagcacaattgattacagctcctaccggaagacccaaggaaatccggaatttcgcaccagag

SEQ ID NO: 6951 - DNA, 72 bp, Homo sapiens
agaccctaaaacctgctgaatcttcacccctcctccgctgggggtagggaaatttgcactgcatttaagcaa

SEQ ID NO: 6952 - DNA, 72 bp, Homo sapiens
gaactgcggccgacgggccctcggcatggcctcgccgccgccgctctggccctggccctggcccggaccgcc

SEQ ID NO: 6953 - DNA, 72 bp, Homo sapiens
atgatgggggtgtgagttgcataattagcaagtgtcgggagaatgtgcgttaagagtgcgtcagagatttag

SEQ ID NO: 6954 - DNA, 72 bp, Homo sapiens
gcttgtcatcaaacactgcagatggtatgaaaccacgtcaaaggcaatgtgataaatggggaggaataatat

SEQ ID NO: 6955 - DNA, 72 bp, Homo sapiens
taatgttaaggtcagaagactgcctggcattttgacgattctttacacatatttatttatatgaatgatttc

SEQ ID NO: 6956 - DNA, 72 bp, Homo sapiens
tgccaaatattccagcttcctgcattctaggaccccgttatgtgggtaaaaggggccttgggactagtttgg

SEQ ID NO: 6957 - DNA, 72 bp, Homo sapiens
gcccttgaatcttggcctagggcttgcattgggttcggtcccacttcagaggttcagtttgaagtgctcaag

SEQ ID NO: 6958 - DNA, 72 bp, Homo sapiens
ctgggactaggtagaggccagggagggacaacctacgcacatcatttagggaggtgctcattcttgaagggc

SEQ ID NO: 6959 - DNA, 72 bp, Homo sapiens
aaacactggttatctgaaattccaatttaactgggcgtcctgtattttatctgacaagccctaactacttct

SEQ ID NO: 6960 - DNA, 72 bp, Homo sapiens
cactctacaaagaaattctagaagtgacccttctgcggatatgtactcacttctaagtctagaaaaaggcag

SEQ ID NO: 6961 - DNA, 72 bp, Homo sapiens
gcccttcctacagtattactgatggctgtctaatccggttagctcccagtcactacaccccagcctcccagc

SEQ ID NO: 6962 - DNA, 72 bp, Homo sapiens
gcgtggatttaaccatttcctcattacgggagacccggcagcattctctttcacaacttcttctctcacaat

SEQ ID NO: 6963 - DNA, 72 bp, Homo sapiens
ccctgcctgatggaaaattaccaggaggagggaaacggaaggttaaactccaggggtttgtaatttctcaac

SEQ ID NO: 6964 - DNA, 72 bp, Homo sapiens
atggaaacaaaactctaacaaccgtcaaacagcaacgattgtcagaacctagaaaaggcctcttaaatttgc

SEQ ID NO: 6965 - DNA, 72 bp, Homo sapiens
aataaagaccatcagcagcctcacatcagttcaagcgcaattttgccaccaattggattacgaaaagcctct

SEQ ID NO: 6966 - DNA, 72 bp, Homo sapiens
ctgtaatgatctcacagccacagcctgtgctaccgcggtgagctcaagtgtgtcggtatccgcttaaaacac

SEQ ID NO: 6967 - DNA, 72 bp, Homo sapiens
ctgagaccacaagcttctctctcgcttgtggtatccgctatgcccagggcatagggacagagacacaggagg

SEQ ID NO: 6968 - DNA, 72 bp, Homo sapiens
acccggctcctaacggggcagtgggaaccaatgcacgatccgtgtaacacagcgtgttgcatggtgtctggt

SEQ ID NO: 6969 - DNA, 72 bp, Homo sapiens
cctcccccacaccagagcaggcaccaggtcctcctcgtcacaagtgccaggcataaagcaggcactcaataa

SEQ ID NO: 6970 - DNA, 72 bp, Homo sapiens
agactgtggcccgctgtggggagccgagtggctagcggagaactgtggcatcccaggcccaccgtcttcacc

SEQ ID NO: 6971 - DNA, 72 bp, Homo sapiens
ctgtaaacaggcagtttcgtttcttcctttgtgatcgacacgccttttctttccttgtcctgcgtactgcag

SEQ ID NO: 6972 - DNA, 72 bp, Homo sapiens
tcacactgtagcaggaagaagttatgcaaaattctcgtcagatatagaaaaaaggaaacaggatatcattca

SEQ ID NO: 6973 - DNA, 72 bp, Homo sapiens
gtaaattttagttacttctccaaggctcagagtggcgttcctgggattgagccatgctagttcccatagggt

SEQ ID NO: 6974 - DNA, 72 bp, Homo sapiens
gaattcagagcgattcctgattagacctcagagcacgtggtttgaccggccatctggaaagggagggacaag

SEQ ID NO: 6975 - DNA, 72 bp, Homo sapiens
gttactttcctgctcaggttctcattagcccctatcgtctatgggataaaatctaaactcttaagcattacc

SEQ ID NO: 6976 - DNA, 72 bp, Homo sapiens
cccaaaagctgccctgtgggaatcccattgtccaccgcctcttacctaatgtttcgttctggccttgcccca

SEQ ID NO: 6977 - DNA, 72 bp, Homo sapiens
tttttttcacggttattaaaaccgagggtggggggcggaggacgcacgtgggaacccaccaggcgcctcagc

SEQ ID NO: 6978 - DNA, 72 bp, Homo sapiens
aggagaaaggaagaggagatttctcaagtcaatttcgtatttgggtagaaatctgcaggcttgaggcaccta

SEQ ID NO: 6979 - DNA, 72 bp, Homo sapiens
ggattattggctgttcctgcctccatgcttttgttcgtttccactacccttcatcccattctacaaaatctt

SEQ ID NO: 6980 - DNA, 72 bp, Homo sapiens
cccgagaccctgggctctctggtcagggtctggggcgcgtacctgtcgggcgaggggctcggtgagcgtctc

SEQ ID NO: 6981 - DNA, 72 bp, Homo sapiens
cactgaaatttaaaatagcaatttacaacagcagccgaaaacagaagaactgcctctcttaactctgtgtgt

SEQ ID NO: 6982 - DNA, 72 bp, Homo sapiens
agtcagcacttcccggaaatcggcaaactgagccacgtcctgctggcggcactccagctggtattggtaggc

SEQ ID NO: 6983 - DNA, 72 bp, Homo sapiens
agccaacacagagccagctgcctgagttcactgttcggggtcaaggaggggggattcagccctggggctcag

SEQ ID NO: 6984 - DNA, 72 bp, Homo sapiens
gaaaggtcaggctcctcaggcagtgctcacagcctcgtgatttggcctctgggccatgatcaggctcctcaa

SEQ ID NO: 6985 - DNA, 72 bp, Homo sapiens
tcaatatgaacatgaattcagccagtattgctccccggattgcaaactcagttccccatgggaaccaggcag

SEQ ID NO: 6986 - DNA, 72 bp, Homo sapiens
attgctcagcttccaagggaggggaacgagtgtctcgtctctcccacctagaggctcgtgctgcctgtggtc

SEQ ID NO: 6987 - DNA, 72 bp, Homo sapiens
cctcattcctagaggaagatccctgccccagcacacgcacaaaagggaaattgaggccccaagatcctatta

SEQ ID NO: 6988 - DNA, 72 bp, Homo sapiens
tttgacatagactaacagtgtgatgtgagcatctgcgtaaaaaggcgacatatggagcatgcccagtgtggg

SEQ ID NO: 6989 - DNA, 72 bp, Homo sapiens
tgaaaagagttgatatgcctggcacacaatgaccccgaagatggtgcagcttggatagtgaatgtgcaagtt

SEQ ID NO: 6990 - DNA, 72 bp, Homo sapiens
cttaaacatttactgagggcccacagtgtgctccgcggttgctgagcaaacacgcagtttcaatgcaggata

SEQ ID NO: 6991 - DNA, 72 bp, Homo sapiens
actacactttacagtttgccaagagttttccattgcgataccccgactgtgctcaaggtacactccagggta

SEQ ID NO: 6992 - DNA, 72 bp, Homo sapiens
agcccctgctgcccaataaaaccactccgaccccacggcctcttgtcttgactctggtggtccagggtgggg

SEQ ID NO: 6993 - DNA, 72 bp, Homo sapiens
caattatgcaagatgaaaaaaaatttgaagacgaacgatggtgatggttgcaccacaatgtgaatggacttc

SEQ ID NO: 6994 - DNA, 72 bp, Homo sapiens
cctccatctgctttttccccatgccaggacggtgccggctgaaagggaagtgtcagctgttcttctgtcttt

SEQ ID NO: 6995 - DNA, 72 bp, Homo sapiens
gcacatcactgcatggctgttctctcttctggatacggccgccctttctgcctagagacgtttgattcttcc

SEQ ID NO: 6996 - DNA, 72 bp, Homo sapiens
ccgtggtgacgccagaccccacctgcttcccctcgcgcagccaggacacctgaatctgccggggactgaaac

SEQ ID NO: 6997 - DNA, 72 bp, Homo sapiens
caccagcagctggtcctcattccaggctaagggctcgccgtagtggctccctccgaggctgtcccaccagac

SEQ ID NO: 6998 - DNA, 72 bp, Homo sapiens
tgggctgcctcgggagttgcagcgtcttgggccgccggaaggtgggtgacgtacggatcttctttttttgtg

SEQ ID NO: 6999 - DNA, 72 bp, Homo sapiens
caggccacttctaagagccaggcagggcagggggccgcccaggaagtgctttctctatttcatcttcaaaga

SEQ ID NO: 7000 - DNA, 72 bp, Homo sapiens
tctcggccacctcctgcatagagggtaccattctgcgctgctgcaagttacggaatgaaaaattagaacaac

SEQ ID NO: 7001 - DNA, 72 bp, Homo sapiens
gagtagggcaaccaaccatgtgcttagctgggtcccgggcaaaccaggacacataggtcaaggcatatgctc

SEQ ID NO: 7002 - DNA, 72 bp, Homo sapiens
agccacaagagggatgccaagccagggcaatatgacgcccccacagcccaccccactggtctccagagaggc

SEQ ID NO: 7003 - DNA, 72 bp, Homo sapiens
cgctcctggactctcggagggagtgagcctcaccgcgtactgccacccccagccggcgcccattcactttat

SEQ ID NO: 7004 - DNA, 72 bp, Homo sapiens
ccctcctgccgtgctcgcgcccgtgcccgatgtcccggctggacttcctcaaggcctcgcacttctcgctgg

SEQ ID NO: 7005 - DNA, 72 bp, Homo sapiens
ccgacagcaagcatggagctcgcacacagctctctcgccttccaggcgtggctcagtggcaccatccttgtg

SEQ ID NO: 7006 - DNA, 72 bp, Homo sapiens
gtgagctggccaagtcctcctgagcaagcgagtggcggctggcccggccggcctgggcttgggcctcctcca

SEQ ID NO: 7007 - DNA, 72 bp, Homo sapiens
tgcctccgcaatctcgtgaggtgaggaaccacctccgtccccactccatgtcctaggaaaccgagacctgag

SEQ ID NO: 7008 - DNA, 72 bp, Homo sapiens
cgggacctggaatgatttcacagctcccaaggtttcgggtttctccagggtggcctcttccatcgcctccct

SEQ ID NO: 7009 - DNA, 72 bp, Homo sapiens
gtatgtccatcctggtggaggtgaccttggactggcgtttgactccccacagccagtctctgctaagccctg

SEQ ID NO: 7010 - DNA, 72 bp, Homo sapiens
cgggccggggagcggctggagcaaagatcctggggcgcagataagtgtgggctgcccatgtggagccccctg

SEQ ID NO: 7011 - DNA, 72 bp, Homo sapiens
ttcttgggcccaatcagacaataatgaagtgcaggcgagacagcattctgcactcacattccaggcactggt

SEQ ID NO: 7012 - DNA, 72 bp, Homo sapiens
ccatccagcacgcgctcctgacaccatgctctgttcgggctttgtcagaggtcctggcccacggcctggaga

SEQ ID NO: 7013 - DNA, 72 bp, Homo sapiens
gacatggcagccaactgtggagcctcggttggcctcggatagctggtccccccttcattcacaccacatatc

SEQ ID NO: 7014 - DNA, 72 bp, Homo sapiens
gtgttgagggtgggagttggggggggaaactcacgcggcccgtacttccaccgcatctcagattgaccgccg

SEQ ID NO: 7015 - DNA, 72 bp, Homo sapiens
attgctgttgcttcctcaatcggtccttagtgaaacgccaatctcagtggtgtgggaacgagtatgagagac

SEQ ID NO: 7016 - DNA, 72 bp, Homo sapiens
agcctgggctgcacagcttgggctgctagctggcgcggggccacgcgcctgtctgtactgcccagccgccgg

SEQ ID NO: 7017 - DNA, 72 bp, Homo sapiens
tttcctcatttgcttgtggccagagaaacgtgagacggtggactgtggggtaattaagaaagtctgtgaaag

SEQ ID NO: 7018 - DNA, 72 bp, Homo sapiens
aggcgccttcctgggtttcctcacgctgcagcagccggattccaagagcaagcggcctagagacaggaactg

SEQ ID NO: 7019 - DNA, 72 bp, Homo sapiens
gggatataatctcttggtgcgccgttttttaagcccgtcggaaaagtgcagtattcaggtgggagtgacccg

SEQ ID NO: 7020 - DNA, 72 bp, Homo sapiens
ttggctcaggaatgagaatgtaagtgaagagagggcgcccgaggcaatctgcccaggctctaccgatgctca

SEQ ID NO: 7021 - DNA, 72 bp, Homo sapiens
tcttcaagcattgcctcagggacatgccaagggaacggaaaccagtcccagtaccctgctctgggagatgtg

SEQ ID NO: 7022 - DNA, 72 bp, Homo sapiens
gtcttttgtgctggagtgtctgctggcatttgccccgtgcatgtatagcttggtcttgatttgattggcacc

SEQ ID NO: 7023 - DNA, 72 bp, Homo sapiens
cctaaactacattttctaccgtcactgtcacgtggcgagccacatattgtgcaatatgctttagcaggcatg

SEQ ID NO: 7024 - DNA, 72 bp, Homo sapiens
tcttttatctgtgtcccctatccagttgccctttccgcagtccctggcacttctattttataccatcagttg

SEQ ID NO: 7025 - DNA, 72 bp, Homo sapiens
cccagctggagccaaaccaaggcctggattctcctcgtggatgtctggtaaggccccaccacgtaccccagt

SEQ ID NO: 7026 - DNA, 72 bp, Homo sapiens
ctttacttgtacacgcgtgtgagtgctcgcgcacgcgggtgcagtcatcccttggtatctgtcgggggttga

SEQ ID NO: 7027 - DNA, 72 bp, Homo sapiens
tcacggggagcaagtgggcaggggacggtccagatcgatggccaccaactgagccgctgctacgtggccccc

SEQ ID NO: 7028 - DNA, 72 bp, Homo sapiens
agtccctgaccacagctctttggtttcagctcccgcggtctctcagctggtcaactctgaggaagctgggct

SEQ ID NO: 7029 - DNA, 72 bp, Homo sapiens
catcaccgctttaagaattctttttccttgcatctcgctataattcttgtttcctgtttctggcttgttata

SEQ ID NO: 7030 - DNA, 72 bp, Homo sapiens
tttcccccgtgcctgctgcatggcctggggatgctcgctgggcagggtccagccgtggggggtgactggcca

SEQ ID NO: 7031 - DNA, 72 bp, Homo sapiens
tcgctgaccccggagttgggctgaccttccttggccgcccggatgccgacccccaatgcccctgtagcctgg

SEQ ID NO: 7032 - DNA, 72 bp, Homo sapiens
cgggaagtgatccagctgccttcacacggaggacacgagactgcttcctcaagggctcctgcctgcctggac

SEQ ID NO: 7033 - DNA, 72 bp, Homo sapiens
ctaaagcaaatacaagccaggtgccaggaccttgacgacgctggggttggttctgttattctgcatggttcc

SEQ ID NO: 7034 - DNA, 72 bp, Homo sapiens
gtccctgcccagcacctccggtcagctggcccccacgacacgatgtgccagagcagtgcccgggcccggccc

SEQ ID NO: 7035 - DNA, 72 bp, Homo sapiens
gccacctgcgaggttcagccaccccgtccccactccggaacacattgaagctgagcaaggagaaaagactga

SEQ ID NO: 7036 - DNA, 72 bp, Homo sapiens
tcccaagtagctgggattataggcatgggccaccacgccccgctaatacggaggcacttttaattagcccac

SEQ ID NO: 7037 - DNA, 72 bp, Homo sapiens
ggcccacagtggtcaagccacctacccaaggccctcggccggtaggtgtaaagtcaggattacggccaatgc

SEQ ID NO: 7038 - DNA, 72 bp, Homo sapiens
gcagcagcactgtgagggactgggaatgcttcctccggcccttggaggcctcagcaactcactgatgtcaca

SEQ ID NO: 7039 - DNA, 72 bp, Homo sapiens
gggaacctgggctgcgccaggcgcttgcgggccagcgcgagttccgggtgggcgtgggctcggcggcccggc

SEQ ID NO: 7040 - DNA, 72 bp, Homo sapiens
aggggaggtcgagtcaccggcggaaggaaaataaacggcgcagcagagaaagggtcttggccgctggtcaac

SEQ ID NO: 7041 - DNA, 72 bp, Homo sapiens
agacccttagtcactgtactcacaccaaaggcacgcggaccacagacagggggatcacagactcccaccagg

SEQ ID NO: 7042 - DNA, 72 bp, Homo sapiens
gtagttggctggcccctggtgtaatgtaaccaacacgtgggcacagctgaataagaagaggaataataacct

SEQ ID NO: 7043 - DNA, 72 bp, Homo sapiens
cctgctggaggagggtgttgtgggccccagatcaacgtcatccccaacttccctgctgcacctcccaggcct

SEQ ID NO: 7044 - DNA, 72 bp, Homo sapiens
tctggtgggtgtctctctggtggctcttttctgaccgccatgaatgccagtgttggcttgcccccctgccgc

SEQ ID NO: 7045 - DNA, 72 bp, Homo sapiens
cctgccacgtcctgccgggtatgggagtggcaatgcgagcctagtgctgcagcattctagacctggagcggg

SEQ ID NO: 7046 - DNA, 72 bp, Homo sapiens
cgagcacagacaggcttgcggcaccagtcctctcccgttgcacgccacacagcgctttccatgcattaactg

SEQ ID NO: 7047 - DNA, 72 bp, Homo sapiens
aagtaaagggtagtactaggattccaagctagcttcgtcacacccctgaggctgaggtcttgaccacagatc

SEQ ID NO: 7048 - DNA, 72 bp, Homo sapiens
gtgttacgggccctgcaggaatctctgtgtgtccacggcggctctgagaggtgaatatttgtgtagtgtggg

SEQ ID NO: 7049 - DNA, 72 bp, Homo sapiens
actttgcagataatagtaaatgtctgtacagtattcgtctgctaaggctgtcgtaacaccataccacagact

SEQ ID NO: 7050 - DNA, 72 bp, Homo sapiens
atggaagtgctttaagaagccttcactgtgagctgcgcaggggtattacttatgagggcattctcagggctc

SEQ ID NO: 7051 - DNA, 72 bp, Homo sapiens
actaccgcctcctgccctcagagagcagcaggcagcgtctgagcttcttcctttcctctcttccccctttcc

SEQ ID NO: 7052 - DNA, 72 bp, Homo sapiens
cttgggttcagaagcttgtgtctgtcacccagggccgcccagccccggggtttgcgaaggtccggggtagga

SEQ ID NO: 7053 - DNA, 72 bp, Homo sapiens
cttggttatgtgccctcagccaccaggatatgaaccgtgtctgcagagcttcactttagtgagcttacaagt

SEQ ID NO: 7054 - DNA, 72 bp, Homo sapiens
tcaagctattctcctgccttagcttcccaagtagccgggattataggcacgtgccgccacacccagcttttt

SEQ ID NO: 7055 - DNA, 72 bp, Homo sapiens
gcttggtaggtgtaagtaatagcagcccttagccacggagtctttatgtggtttattcctgcaaggttgttt

SEQ ID NO: 7056 - DNA, 72 bp, Homo sapiens
gacgtcactctgctcaaacaccagggagccgaggtcgacagctatgagccaagagctatgagacggcagaac

SEQ ID NO: 7057 - DNA, 72 bp, Homo sapiens
cacagggtttgtgtgacctgcagccagcagcccagcggtctggtggtgtcctgcttggtggaagtctcgcag

SEQ ID NO: 7058 - DNA, 72 bp, Homo sapiens
aagagttgaggggcccataagggaagagagaagtccgaataaagtttggtcaagacaaagcagaagctaaga

SEQ ID NO: 7059 - DNA, 72 bp, Homo sapiens
tatgcaataaatagcgctcctgggctgggccgggccggctgccttcaaaccccactcggcccctaccagtct

SEQ ID NO: 7060 - DNA, 72 bp, Homo sapiens
ctcagggttgtctgaggctgatcttggaggcggtgcgctggtagaggcaccgcacacaggcatcgtttcaca

SEQ ID NO: 7061 - DNA, 72 bp, Homo sapiens
cgtgggagtagcctgtttctccacggctgccaccacgtcagaggcgctacaggctctcccatctcactgggt

SEQ ID NO: 7062 - DNA, 72 bp, Homo sapiens
gattcatttgttaaacaaatactgagttccagctacgtgtaaggcatcataggggcagaagatacagcagtg

SEQ ID NO: 7063 - DNA, 72 bp, Homo sapiens
cagcggccgcgccccgccgcccctcggcgttcgcgcgcagcccctgcgggggtggccgccatcaaagcgtct

SEQ ID NO: 7064 - DNA, 72 bp, Homo sapiens
gcggccttgtgagctgctgccaagaggcaggtgcccgtgcaaagccttcctgtgaaggaatctcactgaggt

SEQ ID NO: 7065 - DNA, 72 bp, Homo sapiens
atacggtcctgtctgtgtgtcccgtggaagcgctacgtggatggtggcatttcagacaacctgccactctat

SEQ ID NO: 7066 - DNA, 72 bp, Homo sapiens
aagagcaaaaatgcctcttacaaaagcatacccaacggctgtccttttttccaagaccagttctgacagcta

SEQ ID NO: 7067 - DNA, 72 bp, Homo sapiens
tgcagtgtgctgccagggctggaagaagcggcacccgggggcgctcacctgtgaaggtgaggctgggtcttc

SEQ ID NO: 7068 - DNA, 72 bp, Homo sapiens
cagcttggctatgttgctggaattgctgcgcctcacgtttctggaatctacctagaggattctgaagaaggc

SEQ ID NO: 7069 - DNA, 72 bp, Homo sapiens
aggaagtgagctggcctgggagtgtggaaacttggcgtgttctcccagcttagtcttactaacgtgcttggg

SEQ ID NO: 7070 - DNA, 72 bp, Homo sapiens
gcgccctccgagattggaggcgcgcaccaccgtctcgccgatgtgccaccctgggctgcagctgcagcttcg

SEQ ID NO: 7071 - DNA, 72 bp, Homo sapiens
gcttttttgccagtgactcatcagtcaccacaaaccgaaaggtcatgtgccctgccacagcacaaagcaacc

SEQ ID NO: 7072 - DNA, 72 bp, Homo sapiens
ggcttgggagtggcctgggcagctcacacctcttccgctttcctcccgtggtccctacttctcctttctggg

SEQ ID NO: 7073 - DNA, 72 bp, Homo sapiens
gggaggctttaaaaggggggatgcaccggaagtgacgccagtcagaggttaacggaaaacggaagctggctg

SEQ ID NO: 7074 - DNA, 72 bp, Homo sapiens
gcagaaatgctatatttccacttcacaacccagaacgtgcattttattttacatttagaggaggaacaaaca

SEQ ID NO: 7075 - DNA, 72 bp, Homo sapiens
tcagctagacaggggaattataataggaggtgtggcgtgcacacctctccagtaggggagggtctgataagt

SEQ ID NO: 7076 - DNA, 72 bp, Homo sapiens
ctgcctttttcttgctttcctgtaacagtgtggcacgcaacgaggccagagacaaccacagaaccagagtcc

SEQ ID NO: 7077 - DNA, 72 bp, Homo sapiens
gccgcttccactggtgctgcgtagtacagtgccaccgctgccgtgtgcgcaaggagctcagcctctgcctgt

SEQ ID NO: 7078 - DNA, 72 bp, Homo sapiens
tcagcttcacgctgtccgcccttcgccacccaccgcgcctgctgctcaggaatgttccaagcaacttggtgg

SEQ ID NO: 7079 - DNA, 72 bp, Homo sapiens
gtagaatcagcacttaaattaaggcagggccctagcggcttcaagtaaccctacctgaacccctgtctgaaa

SEQ ID NO: 7080 - DNA, 72 bp, Homo sapiens
tggtaccagaacccatgtctgtctactcccaagtccgtgtttctcctctagaccacaggctctcagagcata

SEQ ID NO: 7081 - DNA, 72 bp, Homo sapiens
cagctgtgtggttccagatgaccagaagccacaagcggttgctgcttctctcttgggattggttggggagtg

SEQ ID NO: 7082 - DNA, 72 bp, Homo sapiens
aggatgaggaagaaggggaggaagtggtggaggaccgagattactactatgacaccttcaaaggagatgact

SEQ ID NO: 7083 - DNA, 72 bp, Homo sapiens
aaaatgagattgcccaaggattgtgaataatgtttcgtatactgacatctttaagtgactcaactgtggata

SEQ ID NO: 7084 - DNA, 72 bp, Homo sapiens
cagggattatgatgctgttaggttggagtttgaatcggctcatagctttggtagtaattgtgattaatatta

SEQ ID NO: 7085 - DNA, 72 bp, Homo sapiens
ccatatctgtccaggagccgttggccaggcacttgcggaccttgggccccaccacctcgcgctccccccggc

SEQ ID NO: 7086 - DNA, 72 bp, Homo sapiens
cccactccccaaagtcccactctctgaccttcagccggcacaaggacctcagtctgaagtccttatggcagg

SEQ ID NO: 7087 - DNA, 72 bp, Homo sapiens
ttaagactcagggagacgctgggcgcagtggctcacgcctgtcatcccagcactttgggagactgaggcggg

SEQ ID NO: 7088 - DNA, 72 bp, Homo sapiens
gagggtgactcttagtgttgccaaacagaggaaagcgggaagtggccctgaacctcctgatggatgagcatg

SEQ ID NO: 7089 - DNA, 72 bp, Homo sapiens
ggggttttgtttttctttggtttggtttggtatagcgccacaagttgctgttgactcatttagcttctagcc

SEQ ID NO: 7090 - DNA, 72 bp, Homo sapiens
gtggggtgaggagtagctcatctggaagacgcctgcgtcgcgtgcgcgatgccggagtgggagcagctgtgg

SEQ ID NO: 7091 - DNA, 72 bp, Homo sapiens
tcaggttttcagtgttcccaaaccaccctgacatacgtccaccacttaaagttctacattataatttaccac

SEQ ID NO: 7092 - DNA, 72 bp, Homo sapiens
ccagcttctgtggttgcactcaattgaacaacaggcggatttacgttaaactttgttttcacctttcactaa

SEQ ID NO: 7093 - DNA, 72 bp, Homo sapiens
tggctacctctaccccagaagccaccccggcgacccgccctcaggcctggccccgccactgtccaggaaaca

SEQ ID NO: 7094 - DNA, 72 bp, Homo sapiens
ctgtgaccgctctcgggtgactgtcacgctcatcacgttaaaaacgatctccatctccctctgtcaccctct

SEQ ID NO: 7095 - DNA, 72 bp, Homo sapiens
ctggatattcaggtcagggacagtgttcctcagcacgaggctggccttcagcacagaactctccagggaggg

SEQ ID NO: 7096 - DNA, 72 bp, Homo sapiens
acatttccaactctagtgagtaaccttgttcctcccggcactcttgtcgagttagcgtttacgtgcagaatt

SEQ ID NO: 7097 - DNA, 72 bp, Homo sapiens
cttggagacagccctgagtcaggtcaggtggcaatcgggatgacgttacacctcccacggagacgtctaaac

SEQ ID NO: 7098 - DNA, 72 bp, Homo sapiens
ggagtcgctttcccaacaggctcccacttcagccccgtctgttcagatcgcccaacttacccccaaaaagcc

SEQ ID NO: 7099 - DNA, 72 bp, Homo sapiens
ctacatcttttatttctttgttccgttatgccaatcgcaaaagaaacaaacaaaacacaaaccgagcaagca

SEQ ID NO: 7100 - DNA, 72 bp, Homo sapiens
gttgcaaatgcagggtttctcaaccaccatactatcggcttgctggactgcataagtctttgtgcattgcag

SEQ ID NO: 7101 - DNA, 72 bp, Homo sapiens
gacgttcctagaggcaggcgctggccacctctggccgaggacgccctaagtggggacgggagtgaacccttc

SEQ ID NO: 7102 - DNA, 72 bp, Homo sapiens
ttcataagtaatcattgcaccatttattgagtaaccgctgcatgccaggcatttttctagatacattagaca

SEQ ID NO: 7103 - DNA, 72 bp, Homo sapiens
ccgagcgtcctggggccaccctgctctccagggcccgccatcctggaaaagaaaggcgaactacattaccca

SEQ ID NO: 7104 - DNA, 72 bp, Homo sapiens
actgaggttttaccagttttgggaccaggattcagcgcttctggattctagtcctgtggtctttctgctcta

SEQ ID NO: 7105 - DNA, 72 bp, Homo sapiens
ctaggacgtggctccaggtgcgccctgccccgcggcgaggttcccagaatggcccttcccagcccctaccga

SEQ ID NO: 7106 - DNA, 72 bp, Homo sapiens
ttagcgcaaggagcccagccagacacggcggctggcgctgctggacttctttattgatgaagttgatctcgt

SEQ ID NO: 7107 - DNA, 72 bp, Homo sapiens
tctgtatcagagtcaagatatggggtggatgagtccgttccccaagggtgtgctttggagccactgccacag

SEQ ID NO: 7108 - DNA, 72 bp, Homo sapiens
cagagggaatatgatattcatgaaactgaccaggccgtgaatgatcatcctggaactctattcttctcagac

SEQ ID NO: 7109 - DNA, 72 bp, Homo sapiens
tttgagctgagacctaagtgaccaagagccagccacgcagatttagaaccagagaccttcaggtaaaggaaa

SEQ ID NO: 7110 - DNA, 72 bp, Homo sapiens
gccctgggaggtggccattcagaggagggcagcggcgggggaaggtgcccacaggccaccaaaggccacagc

SEQ ID NO: 7111 - DNA, 72 bp, Homo sapiens
caggaggcctgctgcctgcagacactgctcccagacgcagcggcctcggccatcagagcgtgtcccacgatg

SEQ ID NO: 7112 - DNA, 72 bp, Homo sapiens
taatcttgggaccccatgcatatgctttgtacaagcggaaaatttccaacttatctgataggaaagtgaatt

SEQ ID NO: 7113 - DNA, 72 bp, Homo sapiens
cgcggctgcacacttccgtcgcccaggccccgccccgttccccgccccgccgcgccatgcccagccgagtag

SEQ ID NO: 7114 - DNA, 72 bp, Homo sapiens
tggcagagtctaagttccctttcttctctcagcaccgcagggcaaggcccgaggaactgctcttgcctgagc

SEQ ID NO: 7115 - DNA, 72 bp, Homo sapiens
ccatctccagagggagcagatcagaggaggcgacacgggaggggtggatgaggtcacctgcccaggggggca

SEQ ID NO: 7116 - DNA, 72 bp, Homo sapiens
acaggccattctgagtctgctagtccagcaagcctcgccgcaggcagagtggggaggatttggccagcgggc

SEQ ID NO: 7117 - DNA, 72 bp, Homo sapiens
caggctcaggctactgtgctgggtcccctctgccccgcacgccccgcgagcaccagcagggcctccccggca

SEQ ID NO: 7118 - DNA, 72 bp, Homo sapiens
ggatggaagccataatgcaagcaattgagtattaacggaagtgagagtatggcaaagggaaatatgtactac

SEQ ID NO: 7119 - DNA, 72 bp, Homo sapiens
aataaaggtttctagaaggagatcacataacaacacgtgcacacgatttcccaagatgtggaaatacatgta

SEQ ID NO: 7120 - DNA, 72 bp, Homo sapiens
acccgagaaaggggcggggtctgcatcgccccaaccgcgagcggcttgtgaattgcagatgctgagaacttg

SEQ ID NO: 7121 - DNA, 72 bp, Homo sapiens
tgtgtatagctttaggagccatagctttccactcccgaacagcaactgggaatcaaaagggaagcaatgtcc

SEQ ID NO: 7122 - DNA, 72 bp, Homo sapiens
aaagagccggtgtgcttatataagagccaggaggtcgggcaagcctcctctgggagtgtctgggcgctggag

SEQ ID NO: 7123 - DNA, 72 bp, Homo sapiens
cccctcagagcgcgccccttgggggtaaccccagacgcttgttcccgagccgactccgtgcactcgacacag

SEQ ID NO: 7124 - DNA, 72 bp, Homo sapiens
tgcaatttcctgggccacatcgctgagacagattccgcatgttctgcaccagcagtcatttccccttcatgg

SEQ ID NO: 7125 - DNA, 72 bp, Homo sapiens
aacaccaagtgcctggcgttaggctgtgttgacagcgaggttaggaaccagagccaggtataaagaacaagg

SEQ ID NO: 7126 - DNA, 72 bp, Homo sapiens
ccagctctcctggcggggagcaggtcccgaggggccgagtgcacctggaggcccagcaccccagtcctctgc

SEQ ID NO: 7127 - DNA, 72 bp, Homo sapiens
taggcttgtggtttttcatatgagcagggaccacacgaaatgcagatccctggccactggtgtggtcactct

SEQ ID NO: 7128 - DNA, 72 bp, Homo sapiens
gcctcgctttcaatgctgctggccttcccttctaccggtactgggtgccccctgcacatgcgcatggaaggg

SEQ ID NO: 7129 - DNA, 72 bp, Homo sapiens
cagtcaagagtggggggacacaggcagggactgtgcgactccacccaacacaaagactcaacgagtatgcac

SEQ ID NO: 7130 - DNA, 72 bp, Homo sapiens
cgttgcgttcatcaattcaacagacatccactgagcgccccctatgggtcaagtcggcagctgggtgctctg

SEQ ID NO: 7131 - DNA, 72 bp, Homo sapiens
cttcaagcattcttctctgctgtgatgttgtttcccgtcctgaaaagcagggaggaaatgatcaatcagtgt

SEQ ID NO: 7132 - DNA, 72 bp, Homo sapiens
gggggtgggaggaagaacagaaaagggaacagtgccgccctagcaaatcaaaagtttaagatgcatggactg

SEQ ID NO: 7133 - DNA, 72 bp, Homo sapiens
ctcttgcttaagaggatactctatgcattttcagacgtatgactaactgggcaaaaagtttaaagaataaaa

SEQ ID NO: 7134 - DNA, 72 bp, Homo sapiens
ataaaatagtggcagactcttgagcacctgctggccgggagctggacgctaggtggcctccgctagccctcc

SEQ ID NO: 7135 - DNA, 72 bp, Homo sapiens
ttcctcttccttggcttcccaagcccccagggcgtcgccaggaggaggtctgtgattacaaaccccttctga

SEQ ID NO: 7136 - DNA, 72 bp, Homo sapiens
catgggtggtgagccactgggacgagcgccaggcccgggtccgctactaccaccaactgagccaacatgtga

SEQ ID NO: 7137 - DNA, 72 bp, Homo sapiens
attgatcagacaaagccttaagtagttagagaacgcggataggctaaaagggaagtgtgaagagctacaaaa

SEQ ID NO: 7138 - DNA, 72 bp, Homo sapiens
aaggaagcagcctgggttagctaggggtggggtcacgtcacactaagagggtttggagaagttcaagggagg

SEQ ID NO: 7139 - DNA, 72 bp, Homo sapiens
atcctcaggggcaggaggggaggggagaggaaacccgagcctggtgaggaggttaaaagtttgaacttgatc

SEQ ID NO: 7140 - DNA, 72 bp, Homo sapiens
ctgagcttcttgcagggaggaggaagccggatccccggtgctgggcaggaggcccaggagacaccccttgag

SEQ ID NO: 7141 - DNA, 72 bp, Homo sapiens
gaaagactggtcgaaattacgcgggcatgagtcagcgcatccctacgcgccctccgccccttgagggtgggt

SEQ ID NO: 7142 - DNA, 72 bp, Homo sapiens
aaagcgcagcggaggaggtagtggcggccaacgggcgggtggctggcagcccggcccctctgtccgggagag

SEQ ID NO: 7143 - DNA, 72 bp, Homo sapiens
tatatgacaaggcaaggagtcattctgtccagacacgagcagccagacagacttccacactggccacagagc

SEQ ID NO: 7144 - DNA, 72 bp, Homo sapiens
tgaagcctcaggggagagaacatcagagagggacacgggtcacaacaagacaatcacattgaactgggattg

SEQ ID NO: 7145 - DNA, 72 bp, Homo sapiens
tccctcaagatctgttgcgcaaaatgtaggcccatcgggaggaagaaagttgaggagaggggtgatttgcct

SEQ ID NO: 7146 - DNA, 72 bp, Homo sapiens
ataaaacgccaaagtccttacaatggctgcagagccggacaacccactggcctgcctagctgtctgacctgc

SEQ ID NO: 7147 - DNA, 72 bp, Homo sapiens
ccagagcagccctcagctgacagccagcaagaaaacgggccttcagacctatggttacaagaaactgaaagc

SEQ ID NO: 7148 - DNA, 72 bp, Homo sapiens
gaaaaatggacaagaaggttccgtgaggcaggcttcgttataaacacctccctccgccatccatattctagc

SEQ ID NO: 7149 - DNA, 72 bp, Homo sapiens
agcctctttctccatgcttttcataaaaggaaccacgtcaaggaaaaaaggaaacttctggtcctagatcct

SEQ ID NO: 7150 - DNA, 72 bp, Homo sapiens
atgccggaattccaagacggaatgcctcttaatgccggtaggagcagaagtgcttttcctaagggggccggg

SEQ ID NO: 7151 - DNA, 72 bp, Homo sapiens
ttggctggtctgcagggaaatgccactgttttggccgggagtagggggcgggagtggcgggagagggggtgg

SEQ ID NO: 7152 - DNA, 72 bp, Homo sapiens
cctgcaggttcgggcactgtggggtggggcgggaacgtggctggcactatgaagtatccacctttctgcggg

SEQ ID NO: 7153 - DNA, 72 bp, Homo sapiens
gggggagacgcggatccctgagggctactgcgcagcggccgccacttatggacacgcagacgcttgcggggc

SEQ ID NO: 7154 - DNA, 72 bp, Homo sapiens
aggatgcagtgttcagagcaatacttctcagtgcacgtctggctgtgtccctgcccagcgctcccagggtca

SEQ ID NO: 7155 - DNA, 72 bp, Homo sapiens
aaagtgctgggattataggcgtgagccaccgtgcccggcccaggcattttgaaatacttcagaatgtgtttc

SEQ ID NO: 7156 - DNA, 72 bp, Homo sapiens
gacttaaccctaactgtgcacaggaccgcgctctccgacccctttgtggcctctcccagaggtacgggctgc

SEQ ID NO: 7157 - DNA, 72 bp, Homo sapiens
gaccaatcatgcttcctactcccctgctgtagccccgggcaaagctgtgtaagatacatttatgcccacagc

SEQ ID NO: 7158 - DNA, 72 bp, Homo sapiens
gcaacctgcccaaagccactatgctggcgggtggccgagtttgggtttaatccaggcccgaacctcagttcc

SEQ ID NO: 7159 - DNA, 72 bp, Homo sapiens
cagtttctgtacctgaattacagttcttgagattacagtacttgcctcatagttgctcaagcacttgctgaa

SEQ ID NO: 7160 - DNA, 72 bp, Homo sapiens
tagatggatgctctcctgcctctccactccctcagcgtgtgtggacgctacccgggggcagctagtcgcggc

SEQ ID NO: 7161 - DNA, 72 bp, Homo sapiens
ctggagataggcgatacaggcagacgctgtccagtcggtggcctctccagagtgaggggcgctcctggtgcg

SEQ ID NO: 7162 - DNA, 72 bp, Homo sapiens
caaaaaatgcaaagcgttttgggaagaggaactagcgggaggaggcctctggaaaggatactgatgcccttg

SEQ ID NO: 7163 - DNA, 72 bp, Homo sapiens
tttcgtctcctgtcaattgggaaaatatcgtgaggcggagatgtgagatgtgatcacgtttataaagtctgc

SEQ ID NO: 7164 - DNA, 72 bp, Homo sapiens
tggtcttgctccagacacccgccccctcctccccccgcaaatggccacagccgcctggaaggaaattacata

SEQ ID NO: 7165 - DNA, 72 bp, Homo sapiens
gctgataggtagtccctcatgctgccgcgagaccccgcgacccgacataaacgctgcagctgctgcgacgcg

SEQ ID NO: 7166 - DNA, 72 bp, Homo sapiens
gttctgaattaacccttcctctttcgagggaagctcggggaggggaagtgccagctttctcttggctggcta

SEQ ID NO: 7167 - DNA, 72 bp, Homo sapiens
ctcgtcatcgtgtgctcttctcctgatggtgttgacgacccagtgttaacagggaatggttattctgtacgg

SEQ ID NO: 7168 - DNA, 72 bp, Homo sapiens
gaactcccttataagggttgactgactcctgcctccgttcatcctgctagccagtctggctgggttcagcca

SEQ ID NO: 7169 - DNA, 72 bp, Homo sapiens
accccgcccacctgggcgatctcagccgtgacccccgggcccctcgagtcaggatccccgcctcccaaggac

SEQ ID NO: 7170 - DNA, 72 bp, Homo sapiens
ggcccccagcaactagacgtgaagggcaaagggtacgtgaagcacaaacttcacctccgtccccagtcaggg

SEQ ID NO: 7171 - DNA, 72 bp, Homo sapiens
gaaggagcaaggccacggttgtactgtgataggaacgtgtcctacgggacctggaacagggagtaccggttg

SEQ ID NO: 7172 - DNA, 72 bp, Homo sapiens
aaaatcctaaggcaggaaatgtgatgttgccaagccgcaggaattttatagctatggggaaatggggttgtc

SEQ ID NO: 7173 - DNA, 72 bp, Homo sapiens
acaggagacaaagctaaaatttttgcagagtcatgcgagtggttagggacaggcctggatgagaacgtacct

SEQ ID NO: 7174 - DNA, 72 bp, Homo sapiens
tcctcgtcctcccaggatccctgtcgggctgggggcgtgccgccccctgcagggtctccaagccctggcccc

SEQ ID NO: 7175 - DNA, 72 bp, Homo sapiens
gggggcctggcacacccccaggtagatgccctgcccgttaacgcccaagggcaggggcttgagtgactcatg

SEQ ID NO: 7176 - DNA, 72 bp, Homo sapiens
gttgtgtggggcctgctgccagtaaccctgggtgacgaagcgtgactcaccactccgaggtcagtgggggga

SEQ ID NO: 7177 - DNA, 72 bp, Homo sapiens
ggatttttctgtgaagttccccaaacccactggcacgcccctgccatagcatgggaaagcaaattgcacgag

SEQ ID NO: 7178 - DNA, 72 bp, Homo sapiens
gccctttcgcaatcgggccacatggctctatcattcgaatattccctagatttatggcaatgccgaggaaca

SEQ ID NO: 7179 - DNA, 72 bp, Homo sapiens
caatactctcggatttacaaagctagatttgtcctcggcaatcatctgcctggaccttctgcccctttcaga

SEQ ID NO: 7180 - DNA, 72 bp, Homo sapiens
caccaaggtggccgtttgatgtggctggccgttagcggggattgggctgaaactgcatcctctgctcaaata

SEQ ID NO: 7181 - DNA, 72 bp, Homo sapiens
gctgctgcctgtactgggggcgatactgggggcggcgcagccgattccgggccccagagaactgcctatcag

SEQ ID NO: 7182 - DNA, 72 bp, Homo sapiens
tcacttccattcagtgctacttctgcttaaaaccacgggagccttgtgcaactctatcaaagcacttgtgca

SEQ ID NO: 7183 - DNA, 72 bp, Homo sapiens
atggggaggagcttgagtgctaccccaggagggggcgggtgggacctttgggttcaagctccactgggcttg

SEQ ID NO: 7184 - DNA, 72 bp, Homo sapiens
caaaattaactcattatcaaaataatgtaggaggacggaaggaacaggaagagaaggaaaacagtacattta

SEQ ID NO: 7185 - DNA, 72 bp, Homo sapiens
gatatagggaaattacctaagagagtctggagccccggtggcacgagatgcatgctagagattagtattaag

SEQ ID NO: 7186 - DNA, 72 bp, Homo sapiens
cagacggcagtgctggtcgtttcctcactggtttgcggggaaggctgggcagaaaaaggatgcaaccttgtt

SEQ ID NO: 7187 - DNA, 72 bp, Homo sapiens
cataatccacctcttctgcttcagttgaggtgacacgtctcagccttagccctgtgccccctgaaacagctg

SEQ ID NO: 7188 - DNA, 72 bp, Homo sapiens
tctttcccaaactgcccacccacagagggcacttgcgtaacaacccaccagccagcttgtgaccagctgggc

SEQ ID NO: 7189 - DNA, 72 bp, Homo sapiens
ttatccctggtcacatccagggagacgcggtccagcggcccaggcgggggacagtgccgttctagaggtcct

SEQ ID NO: 7190 - DNA, 72 bp, Homo sapiens
tgaaggtcctgccaacggctctcttggcgtctcaacgttcggatcagcagcttttttccattctctctctcc

SEQ ID NO: 7191 - DNA, 72 bp, Homo sapiens
cctgcggtgcccgcagtcagtggggcagtgagaaccgcgcaggaaatagctggcgccatggtgtcggttctg

SEQ ID NO: 7192 - DNA, 72 bp, Homo sapiens
ctcctggacacaattacaaagggggcaaaacttgacgtcacctcttttgtgcttcctgaattatctctcccc

SEQ ID NO: 7193 - DNA, 72 bp, Homo sapiens
tctttttctctttcccagtagcctcctgtctggctcgctcagttgtttctccagtaatcttttctcctggag

SEQ ID NO: 7194 - DNA, 72 bp, Homo sapiens
tgtagggtggggaaggaaaggttggcaagaagtcacgcccttctgcccgactgaggaattggttttcatcat

SEQ ID NO: 7195 - DNA, 72 bp, Homo sapiens
gcttctggtgcatcctgtgggcacctcggatgacgcgagggtggagcctgaaacgctggcccaggaaatgga

SEQ ID NO: 7196 - DNA, 72 bp, Homo sapiens
aagggccatgagccatcggaatggagtgcagttagcggtgctggtgaggagaatgacagagcagcacaaccc

SEQ ID NO: 7197 - DNA, 72 bp, Homo sapiens
cacacaagagatggagccaagattcaagcccagggcgtctgaagcaagactggcactccctgccgcccctcg

SEQ ID NO: 7198 - DNA, 72 bp, Homo sapiens
gtgcgtcctcctccctccgcctcccccctccccctcgagatctccaaagataaggcttgaactttgcacttg

SEQ ID NO: 7199 - DNA, 72 bp, Homo sapiens
actgtagggtaacgccaccaagatgctgggcatcccgaacttggtgtttggacacttgattgtggacctgcg

SEQ ID NO: 7200 - DNA, 72 bp, Homo sapiens
cacagccccgggggattgtattggttaaccacacacgctgctatttcagtttaatcttgactgaacttcttg

SEQ ID NO: 7201 - DNA, 72 bp, Homo sapiens
aagggtcatgtgaaaagtcagcatgtctggaatcccgagggttatatttaggagctgggaagattaccccca

SEQ ID NO: 7202 - DNA, 72 bp, Homo sapiens
cagaggcgggcagaggggctgtcttttccttttctcgttgctgcccagggaggagacggggtgacctttccc

SEQ ID NO: 7203 - DNA, 72 bp, Homo sapiens
gctgcctggctaatgggtctacacaaatgacatttcgagtcacaagttatttaatttctccgccaaagtcaa

SEQ ID NO: 7204 - DNA, 72 bp, Homo sapiens
ttggctgttgtgagtggtgccactgtgaaggttcgcgtacaagaatctgtttgagtctatttccagttcttt

SEQ ID NO: 7205 - DNA, 72 bp, Homo sapiens
cggccgcggtctcggcctgtctcggacggtgtcctcgtcaaccattaacacgcgactaagcagctctgggcc

SEQ ID NO: 7206 - DNA, 72 bp, Homo sapiens
aaggcagcatccggtgatgcctttgaaacatacatcggcaaagtcttaatcagatgaaagccaaaaccccta

SEQ ID NO: 7207 - DNA, 72 bp, Homo sapiens
gatgggtagagaacacctgtcttcgcaaccagtatcgctgcagcaacgggaactgtatcaacagcatttggt

SEQ ID NO: 7208 - DNA, 72 bp, Homo sapiens
cctgacccacactgcttacaatagctcaccttcaccgaacacttcctacttgctaggcattggtctaagcct

SEQ ID NO: 7209 - DNA, 72 bp, Homo sapiens
agcccaggctgtccaggtgatggggctgacgtcttcgtccatgaggccccggggtaggggtgaggggggcag

SEQ ID NO: 7210 - DNA, 72 bp, Homo sapiens
acagtaagttgtgtaagtggagaccacctctgggccgtttggggtaccttgagtgtgtcactatggggttag

SEQ ID NO: 7211 - DNA, 72 bp, Homo sapiens
tgctgccgctgctgaatctgtttccctccctgaaacgtagccctgtctctcagctggcttcctgatctggga

SEQ ID NO: 7212 - DNA, 72 bp, Homo sapiens
gcttctaacctttgactcttatttttttccacagccgtcatggaaatgatgagtcagaagattcagcagctc

SEQ ID NO: 7213 - DNA, 72 bp, Homo sapiens
accacttcccctggctaagcctcagtttcctcatccgtgacataaggctacagctcctgtcacctcagaatg

SEQ ID NO: 7214 - DNA, 72 bp, Homo sapiens
tgcttctcctgtgtggcctgacgtccctgtgcttccgctgctgctgtctgagccgccagcaaaatggggaag

SEQ ID NO: 7215 - DNA, 72 bp, Homo sapiens
gctgcatgagtgatgaaagggactttataatccaacgcctgcagtttatagagacccagccttgttaagtga

SEQ ID NO: 7216 - DNA, 72 bp, Homo sapiens
cacctccagtggcttatcaaaatatttgtttcatgcgcacactgggctctcatttaagaggaatttgggaga

SEQ ID NO: 7217 - DNA, 72 bp, Homo sapiens
cggtgaggaggtgcagtgtcaggcagacccgggaccgtggtgatgaggaaatgcagtgtcaggcagacccgg

SEQ ID NO: 7218 - DNA, 72 bp, Homo sapiens
gggccgccagtcggcgtggggtgcggcaaggggagcggggcgctgggtcagccgagggccgggcctcggggg

SEQ ID NO: 7219 - DNA, 72 bp, Homo sapiens
atcaacatggagctgtgtttactgagtggggctttcgcaggctggagctaagaatttccagtatgcgtaaca

SEQ ID NO: 7220 - DNA, 72 bp, Homo sapiens
aatctccagtgacctgaccttggaggcatcccacacgccctcagtcccccggcgggccctgccaccacccct

SEQ ID NO: 7221 - DNA, 72 bp, Homo sapiens
acgcgtgtaaagggaggggagagagagagagagcacgttgtgcatgaatcactgctacagagtcacactcca

SEQ ID NO: 7222 - DNA, 72 bp, Homo sapiens
atcaagcacccggtccaccacaaatatgcacatctcgtcacatgccggtgacattacatgccctccagtggg

SEQ ID NO: 7223 - DNA, 72 bp, Homo sapiens
acagtgacctagaatgaaacagccgggcctgactccgattccgggaattcttggtggactgctaagaactgc

SEQ ID NO: 7224 - DNA, 72 bp, Homo sapiens
ggtccatcagaacagcagccacgaaaacctgagctcgtttgtgtccagaacagtagggaggaaactgctaag

SEQ ID NO: 7225 - DNA, 72 bp, Homo sapiens
caagcccacggcacagggcacaggctctggcggggcgtgttcgaggttgggcgtcagcggaggccgcagggg

SEQ ID NO: 7226 - DNA, 72 bp, Homo sapiens
gagtggatcccattaaatctctagccaaggaggagcgtacttctgtgcttctagggctagacagaacggaag

SEQ ID NO: 7227 - DNA, 72 bp, Homo sapiens
gatggaagagccaaaaggctgcacagggaacgagacgggccccagagcttagtaacacccgaaatccccatg

SEQ ID NO: 7228 - DNA, 72 bp, Homo sapiens
ccctgccaatatacaaacttacctacttcctcctccgagtcctcagccaacagaagcctctggggttgagtt

SEQ ID NO: 7229 - DNA, 72 bp, Homo sapiens
taggtgacaaaccacagctgtcatccacttaatgccggaagcagttgtgacataatgctgagtatgtgcctg

SEQ ID NO: 7230 - DNA, 72 bp, Homo sapiens
ctgtctctcgctctatcttttgtctctgtccctctcgcttctctagatctgtcgatgtatctgtctctccct

SEQ ID NO: 7231 - DNA, 72 bp, Homo sapiens
ccgcctgacagcctggcctggagcccggctgtgggcggcggtgagtgggcagccagcagtgagtagcagccg

SEQ ID NO: 7232 - DNA, 72 bp, Homo sapiens
ggtgttgtaggagagctctggggaggactcagcctcgctagcgggatctggttggtcctggtgggaaggacg

SEQ ID NO: 7233 - DNA, 72 bp, Homo sapiens
atctgctaaaggtagtttcatgattaatggctgcccgaagttaccatcctcaaactattaagccattggaaa

SEQ ID NO: 7234 - DNA, 72 bp, Homo sapiens
tccagtggggtgccgaggctcaggcagcatgacgacggagacctttgtgaaggatatcaagcctgggctcaa

SEQ ID NO: 7235 - DNA, 72 bp, Homo sapiens
ttgcacttgctatctccacttcctcacttctcacacgctcctcaatgcttgcagcctggcttccactggaat

SEQ ID NO: 7236 - DNA, 72 bp, Homo sapiens
tcctggttttcttgccctttggcggtggatttggtcgtgccctggggtggtggaagaactgaatgggcttaa

SEQ ID NO: 7237 - DNA, 72 bp, Homo sapiens
cagctcagattccagctcctcctcttcctcgtcgtcgtcttcagacaccagtgattcagactcaggctaagg

SEQ ID NO: 7238 - DNA, 72 bp, Homo sapiens
cttgaggaagtcgcctgaccgctccaggtcatgtgcgaggccttagggtgtgaacagagcacttcccggttc

SEQ ID NO: 7239 - DNA, 72 bp, Homo sapiens
cttcatgtgcaagagaaattaatgtactgtaatctcgatgtctgtgttgaggaccctccttgtaaattcaag

SEQ ID NO: 7240 - DNA, 72 bp, Homo sapiens
gtgtggaaggggataggaaaccataaattcccagtcgggctggtttttaaacaataagctggggtcaatgtg

SEQ ID NO: 7241 - DNA, 72 bp, Homo sapiens
ggtgaaaacagaagcatgtgtttctaggaaacacacgccaaggcccagagtcatacagtgtcacctgcacca

SEQ ID NO: 7242 - DNA, 72 bp, Homo sapiens
cgcgcgccgaacggcgtgactaagccccgcccacacggcgctcctggcggccaatggaaatggcttacgaga

SEQ ID NO: 7243 - DNA, 72 bp, Homo sapiens
gaaaacgctcgcatatctgcggtccttgacgatatcgtctgacaggttttagaaggagatggtttcttcttg

SEQ ID NO: 7244 - DNA, 72 bp, Homo sapiens
attaaacagacaattaccaaacaatctcgcaatcccgcttccgggtatatgccccaaacaactgaaagcaga

SEQ ID NO: 7245 - DNA, 72 bp, Homo sapiens
aagctcttggcctggcctcctgcagtgccacgctccgtgtatttgacaagctgagttggacactccatgtgg

SEQ ID NO: 7246 - DNA, 72 bp, Homo sapiens
gggaggctccaggttggctcctgttcccgaacgtgcggaggagaccctgacgctaaggaagcaatgagggcc

SEQ ID NO: 7247 - DNA, 72 bp, Homo sapiens
ttataactcgccttctcactgctttggtggtttgccgcctgtagtgggggccggttgccagggaggcgtatt

SEQ ID NO: 7248 - DNA, 72 bp, Homo sapiens
gcccacgctctccccaagttctgtcttcctctccccgttttgaggacatatggccccttgaagtttttgttt

SEQ ID NO: 7249 - DNA, 72 bp, Homo sapiens
taaacatcctgcaatgcacgggacagtccccgcagcgaagaatcatccggcccccagtgtcagttttgccga

SEQ ID NO: 7250 - DNA, 72 bp, Homo sapiens
tctgagtggttgtgggtgagcggcggccggggcagcggcttcccctggacctggtgttcggtcctgaacccc

SEQ ID NO: 7251 - DNA, 72 bp, Homo sapiens
gtgcccagcacccagtgctgagctggtgaagatcccgtggccagaggcacacttaccatatacatcatgact

SEQ ID NO: 7252 - DNA, 72 bp, Homo sapiens
aggggctgggtgggccccatggctccaggacagggcgcccagggaaggcagctagccgaagcgctggctgca

SEQ ID NO: 7253 - DNA, 72 bp, Homo sapiens
aaagctccaggtaggccctgtttggaggctgctgacgtggagagggtggaacatcctgtgttattgattagt

SEQ ID NO: 7254 - DNA, 72 bp, Homo sapiens
gagaggttgttatgtgacaagcactgtttgttttacgtaaatcatcgaggtaaatgctcacaacagccctat

SEQ ID NO: 7255 - DNA, 72 bp, Homo sapiens
aggatgaatcattgctgcagatcctcaggcacacacggtcacacataggcacacacgtgcacactgtcgtgt

SEQ ID NO: 7256 - DNA, 72 bp, Homo sapiens
atctgtaaaaggggaagggggcaagaggttaggcacggttctttctaatgactctgctgaggtggatggttc

SEQ ID NO: 7257 - DNA, 72 bp, Homo sapiens
ggtgcaggatgtttgggggctccgctcggcgtctccggcgatgaccatgtgataaatgacagttatgctgcc

SEQ ID NO: 7258 - DNA, 72 bp, Homo sapiens
cctcagattactctacccgctcaatctttcctccccgcacaggtgccccggagaggccatggagctgagcag

SEQ ID NO: 7259 - DNA, 72 bp, Homo sapiens
agttgcacatcctaaagtttgaagagtctaaataacggggcttccctcagcatgttccctctcctgtttgcc

SEQ ID NO: 7260 - DNA, 72 bp, Homo sapiens
ttgagaagacttgaagaagaagaggaagcagggcacgctgtgctcccctatcatactttctggtgcgatcat

SEQ ID NO: 7261 - DNA, 72 bp, Homo sapiens
agccagagtctgactggccatcaggagaggagccacggcttccagggagctggagctgcagagtcaagaagt

SEQ ID NO: 7262 - DNA, 72 bp, Homo sapiens
ttcacagactgggagggcacttctcccaaatcaagcgagcttgcaaaccacaatttaaatgcctgtgacatt

SEQ ID NO: 7263 - DNA, 72 bp, Homo sapiens
acatggttgcgccctggaaaaagacaaaagacaaacgctgtttgggggctataaaagatattatttttggtg

SEQ ID NO: 7264 - DNA, 72 bp, Homo sapiens
tgagatccttgataaccgcactgtgtggctggggtcgtggacagtgtggttttcccctggaactgggcatct

SEQ ID NO: 7265 - DNA, 72 bp, Homo sapiens
cgagcgccgacagcaggaggaggagggtgaccctgcggtgtaacacaggaaggtctgaccgggtggccctgc

SEQ ID NO: 7266 - DNA, 72 bp, Homo sapiens
aggtcagcgagtggccccacccccatccgtccccgcgggggccccttcccgcgctgagctcagcatgactca

SEQ ID NO: 7267 - DNA, 72 bp, Homo sapiens
tccttaacccgcatctgtagccttttgcactacctcgtcactagcagaaaataggatttttcacctgcaaat

SEQ ID NO: 7268 - DNA, 72 bp, Homo sapiens
ctcccaccagggggcttacatttcaacatgagactcggtgaggacacagatccaaaccacatcaacagtgct

SEQ ID NO: 7269 - DNA, 72 bp, Homo sapiens
cagctgcacctcgccgaggtgccaaacggatgaaacggggtcactttgagaaactgcacacgatgtgcctga

SEQ ID NO: 7270 - DNA, 72 bp, Homo sapiens
tgttttgccgagcctggccgggatttctctttctgcgttgggctgactgggccgcagggaaaccatgtggac

SEQ ID NO: 7271 - DNA, 72 bp, Homo sapiens
cctgcagaagcagagggcactgagctgagaggcaccgtaaaggagccacccaggagagcaggagtcggggag

SEQ ID NO: 7272 - DNA, 72 bp, Homo sapiens
ggaggccaggagggcttgcgttgcacaatctggagcggatccccgggggcggctgagggcctgggaccccag

SEQ ID NO: 7273 - DNA, 72 bp, Homo sapiens
tgtggccctgaaaatcaggatgcctagagaagcttcggagtttgagaagtcccccttcctcccaccctccaa

SEQ ID NO: 7274 - DNA, 72 bp, Homo sapiens
cctctagatgagaacttcctccctactgggctgatcgagtaaagagaaggaaaggtgctgggttcaaaacaa

SEQ ID NO: 7275 - DNA, 72 bp, Homo sapiens
atattctccagatcccacatccggccactcatatacgggaagctgagactgcacagcatattgcttcactgg

SEQ ID NO: 7276 - DNA, 72 bp, Homo sapiens
gttagagtgcatagaaactaggccatgtatgagaacgacctgtggccaaatggagaaagttctgggcgttga

SEQ ID NO: 7277 - DNA, 72 bp, Homo sapiens
tgccatcttcctttttaaatctctcctgggaagttcgcttgttgagactcaaagagtcactcaaactcataa

SEQ ID NO: 7278 - DNA, 72 bp, Homo sapiens
gttagcaacagccgaatcagagtgaagggcatgcccgtattctttgtgccatccttgcaacttttctgaaag

SEQ ID NO: 7279 - DNA, 72 bp, Homo sapiens
cctcagtctgccgaatgcctgtgattgcaggcacgcgccgccacgcctgactggttttggtggagacggggt

SEQ ID NO: 7280 - DNA, 72 bp, Homo sapiens
accaattaatattactcagcacagagatgggggcccggtttccatattttttgcacagctagcaattgggct

SEQ ID NO: 7281 - DNA, 72 bp, Homo sapiens
tgttagcttacaagctgggaatataagtgcattaacggcccacatgagtcaatggtatgcaaaaagtctgtg

SEQ ID NO: 7282 - DNA, 72 bp, Homo sapiens
cagcccctaacaggctgttacttcactacaactgacgatatgatcatcttaatttacttatttctcttgcta

SEQ ID NO: 7283 - DNA, 72 bp, Homo sapiens
tggaaaccccatctaccctcctgtgatgattacatcgtatgcctatatgaaaacatctcatatacctcataa

SEQ ID NO: 7284 - DNA, 72 bp, Homo sapiens
aggccactggggacagtcactacgttttcaggaaccgctcagcccctctgagtgccccgcagatggacctgg

SEQ ID NO: 7285 - DNA, 72 bp, Homo sapiens
cccaccttggcctcccaaagtgctgggattacaggcgtgagccaccgcgcccggactatatatgttttaaaa

SEQ ID NO: 7286 - DNA, 72 bp, Homo sapiens
cgctgccttatgtaaccagtttatgcaagggcagccggcccgcttacataaggggaggccgggccagcgccc

SEQ ID NO: 7287 - DNA, 72 bp, Homo sapiens
tggagaaataccagtactcatatgaaacaaccccacgaaataaagcatcccatgcctcttcccttctcctgc

SEQ ID NO: 7288 - DNA, 72 bp, Homo sapiens
tggggtggggggcagcctgcggggacaacaggggtcgcgggcaccgcaggaggtgatctggcagcataagga

SEQ ID NO: 7289 - DNA, 72 bp, Homo sapiens
tcacagctctgatatggaacattctgtcttcagggcgcatgttgtggggtctataattgatgactgtgagca

SEQ ID NO: 7290 - DNA, 72 bp, Homo sapiens
cggtcacatgaggtgttgcagcagcagcaggccaccgcagagatagctgcttgggtgcagggccatgaagac

SEQ ID NO: 7291 - DNA, 72 bp, Homo sapiens
gtgcctgttgtcatcttttaaagcctcagttttgtcgccatttcccaggtgacctctagcacactcaagttt

SEQ ID NO: 7292 - DNA, 72 bp, Homo sapiens
cagaggggacttgcatatccattcacctaaagctccgttaagaaaggtgaggagccccgggccagacccaca

SEQ ID NO: 7293 - DNA, 72 bp, Homo sapiens
gagctaccctgccggcagcacagagtgaacagcgccgtgcacccatctgggcctgacctgcctacattgtta

SEQ ID NO: 7294 - DNA, 72 bp, Homo sapiens
taatgctttagaccactgccgtggaattctgccatcgactggtctgccacaagcatggtttccacatagcgg

SEQ ID NO: 7295 - DNA, 72 bp, Homo sapiens
aaggagttgctcaaataaagcgtccctggcagtaacgaatcattaactttcagcccactccaaggaatgggt

SEQ ID NO: 7296 - DNA, 72 bp, Homo sapiens
aaggcagctagccgaagcgctggctgcaggaggaccggggcggcaggctccgcggcaggagcagaggcgagg

SEQ ID NO: 7297 - DNA, 72 bp, Homo sapiens
tgagccctccactctttccctgccctctgcaggcacgctggggttgaggcctctgagcctgggccacaaatc

SEQ ID NO: 7298 - DNA, 72 bp, Homo sapiens
gggaatggagatttcctctaaatgcaatggtgcagcgacattggaaaggttgtacattgcaacacatagcca

SEQ ID NO: 7299 - DNA, 72 bp, Homo sapiens
ctggagaaaacaactaggctctccgggcgagatcccgaataccagtttaagggatttgaaatgcaaggccgt

SEQ ID NO: 7300 - DNA, 72 bp, Homo sapiens
cctccagaacccccgccgccatccctgcatgcacccggtcttctgtgcctgcactttggacttgagattgac

SEQ ID NO: 7301 - DNA, 72 bp, Homo sapiens
tgttgtccaaaatgaggggggaagcaaaagtgacacgcagacacagagatatgtccacacagacagccacat

SEQ ID NO: 7302 - DNA, 72 bp, Homo sapiens
ttcatgtccaccagctctgcgttcagcacagcactcggacttgcctaggaattgtaagatttcttttcaaat

SEQ ID NO: 7303 - DNA, 72 bp, Homo sapiens
tccctgtgggagcctgggatgtggggaacagacagcgacactcatcccccaccgccacaaagcggaggattc

SEQ ID NO: 7304 - DNA, 72 bp, Homo sapiens
atggggaagtgaaccaggacttcccctgcaggccccgccccaaagccaggcggcagggagtagggaggcggc

SEQ ID NO: 7305 - DNA, 72 bp, Homo sapiens
caagccaggcctccagtgcgaggttgcgcctaccccggcaacaagcacaccaggactgctagtaacagggca

SEQ ID NO: 7306 - DNA, 72 bp, Homo sapiens
ccttgggcacttcttctagccctgagcttggccagcgcctggctggactggcatgcaaagttcactgtggta

SEQ ID NO: 7307 - DNA, 72 bp, Homo sapiens
ccgaaggccagggctgtacctggctcagaaccaggcgccaagcggcacgggactctccttctgcactcgcag

SEQ ID NO: 7308 - DNA, 72 bp, Homo sapiens
attttttccagttctagcttttcagagtaagttaccgtttatagcatgtaagttatgcttctgggtcagtgg

SEQ ID NO: 7309 - DNA, 72 bp, Homo sapiens
ttggtggaaagctactccctcctccctttttaacacgagaccagcacactgtaagggtgctgtggggcctgc

SEQ ID NO: 7310 - DNA, 72 bp, Homo sapiens
agttgccctttgtcctaggcctctgggctcccagccggctggaggcacagagttatctgtggggcctggagt

SEQ ID NO: 7311 - DNA, 72 bp, Homo sapiens
cgtgatggggaggcgtgggcgtacaccggggggcgcgatggggaggggtgggcgcacaccgggggacgcgat

SEQ ID NO: 7312 - DNA, 72 bp, Homo sapiens
tgtgcgcgggagagagctcgtcgtggggcagcgtgcgaccccttatgaagctgctggagatctcgggacacg

SEQ ID NO: 7313 - DNA, 72 bp, Homo sapiens
gcacatgctctgcctgaattctggccatgtgtttccgtcgtttagttatctaacttgttatctcctgacttc

SEQ ID NO: 7314 - DNA, 72 bp, Homo sapiens
tttttaagatctatccgtgatgatctaactacaaccgatccattgcttctagttatttccttcctacctccc

SEQ ID NO: 7315 - DNA, 72 bp, Homo sapiens
tgtgtggcagagagcagaggaggcagtgtgacttacagctggacacccctgggaccccagactgttgttgtg

SEQ ID NO: 7316 - DNA, 72 bp, Homo sapiens
gtggaggagcagggggcttgcatcagccctggttgcgacagcactgcccggggacgcagagccagctgtggg

SEQ ID NO: 7317 - DNA, 72 bp, Homo sapiens
ggtggcctaatgcttggtgtggcaggcaggggccccgtctcctgagaatatgctccttttgcccaagcaacg

SEQ ID NO: 7318 - DNA, 72 bp, Homo sapiens
agagccagcgctgtgtgtgcagggctgggcctttccgcagccctggagctgctgtctgtctggcctgggtcc

SEQ ID NO: 7319 - DNA, 72 bp, Homo sapiens
cttggaggactgcaaataggttgactggtaaatgtcgttaaccctagttgtatgttaattcaataaagaaag

SEQ ID NO: 7320 - DNA, 72 bp, Homo sapiens
tctgtgtgtgcttgtgcctcgggacacatgtgccccgtgcgccggagggtgggtttcttgcaggtcggcctt

SEQ ID NO: 7321 - DNA, 72 bp, Homo sapiens
agcattgacttgggcaaggcaaatgagcccaaccacgtggagctgggacgtaaggatgacgcaaaagttcac

SEQ ID NO: 7322 - DNA, 72 bp, Homo sapiens
tgggccctcgaagcgagtctcctgcaggtaagggtcgggtggcatgcggggcaaggtagcgcagccgggtgg

SEQ ID NO: 7323 - DNA, 72 bp, Homo sapiens
tctcctctggccagcctggcgttgcaccgtttgtccgcctgctggggcctggtctgtgttcccgtgctccca

SEQ ID NO: 7324 - DNA, 72 bp, Homo sapiens
tttgaaagttcaggtgacccttggtttgagcagtacgctccagggaatatatgtaaacagaatcctttttca

SEQ ID NO: 7325 - DNA, 72 bp, Homo sapiens
aaattttgcttgctttgcagcttttcacagggccccgagagtgcttttagcactaaggatgtacagtcacgc

SEQ ID NO: 7326 - DNA, 72 bp, Homo sapiens
gcagttccttccagcttccttccccctgggaggtccgcttgatgccacttcttcatggcagcacaaacaagg

SEQ ID NO: 7327 - DNA, 72 bp, Homo sapiens
gatctgggggaagatttttaaataagtgggtcagacggatggagaggagatgaggcgatcaatcttagcccc

SEQ ID NO: 7328 - DNA, 72 bp, Homo sapiens
tgagcgacaggagggagcggccctggcaggacggacgtgggaactgcaggggcacaggccctacgtgagctg

SEQ ID NO: 7329 - DNA, 72 bp, Homo sapiens
ggttaccgcgaggtctcaaccatgtctgatatctacgtgggccccttggatggccaccacttttctctgccc

SEQ ID NO: 7330 - DNA, 72 bp, Homo sapiens
aagtaggtttcaccatctgaggatgttcaggcaaacggaatgtcaacagagtgatgtgtgcaattcagagtt

SEQ ID NO: 7331 - DNA, 72 bp, Homo sapiens
aaaatgaaaaaaacaatgtaaagtctgaattactgcgagacgataatctggctccactgcagccaaagtggg

SEQ ID NO: 7332 - DNA, 72 bp, Homo sapiens
gcaagaccccatctcttaaaacaaaaatctggggccggatgcagtggctcacacctgtgagtcccagaactt

SEQ ID NO: 7333 - DNA, 72 bp, Homo sapiens
ctccattcatccctgctgtggcccctggggagtggcgcaattcagaggctggggaggaaatgcccattcttt

SEQ ID NO: 7334 - DNA, 72 bp, Homo sapiens
ggcaagtcttaatttttttttttaattggaaaactcgatctctaggaggaaagaaaaaaaaggcctgggtcc

SEQ ID NO: 7335 - DNA, 72 bp, Homo sapiens
cagtcacaaaaccccaggacatagcccacctgggccgtccctgcccaccgcactgctggggggggggggtgc

SEQ ID NO: 7336 - DNA, 72 bp, Homo sapiens
aagcccagagaaggctcaaagctgccagactccgccgagagcctggcctatttcctgttctccccaccacct

SEQ ID NO: 7337 - DNA, 72 bp, Homo sapiens
attcttcccttctcagtaggcactccttcactctccgctgttggcctccctctcctatcctgcctgcccttc

SEQ ID NO: 7338 - DNA, 72 bp, Homo sapiens
acagatggtggccaagcagtgacagcagtgtgtgccggtgcttgggcccactgcaagactggggacaaaacg

SEQ ID NO: 7339 - DNA, 72 bp, Homo sapiens
cacgggcctatatctctggacagggaagtgatagccggcattcattttcttctttttacacattctcctcta

SEQ ID NO: 7340 - DNA, 72 bp, Homo sapiens
ctggaggtatttaaaaggtgagcactggccaggcacggcagctcacgcctttaatgccagcactttgagagg

SEQ ID NO: 7341 - DNA, 72 bp, Homo sapiens
tcaccattgtggccgtcaccaaggtaatcaggtgacgcccaccccaccatcccactgctgggccttccctct

SEQ ID NO: 7342 - DNA, 72 bp, Homo sapiens
gaacccctggactcaggcacgcgagaagaagacagcgctttgtggagagaattgaccagggacagttatgct

SEQ ID NO: 7343 - DNA, 72 bp, Homo sapiens
agtattaactggctaatgaccgacacagcaggctccgccacctctccctatgctcacccaatgatcacctca

SEQ ID NO: 7344 - DNA, 72 bp, Homo sapiens
aagaaacacaaacatcttgctaagcaagaaccaaacgtttcaagtacttttttttaacgacaagtgattcaa

SEQ ID NO: 7345 - DNA, 72 bp, Homo sapiens
ccccagagtgaagcaataccatggctcagctgactcggcttctcccagtaaaggaagaatgggctggctgag

SEQ ID NO: 7346 - DNA, 72 bp, Homo sapiens
ggaacagtccagagtctgacagaactaagctgttgcgtaagggtctgacctggctgcttgccatgaacccct

SEQ ID NO: 7347 - DNA, 72 bp, Homo sapiens
aagagagggaggatacagaaacactctttgcacttcgtctcctaatgcagagtccatagctcggagttcctg

SEQ ID NO: 7348 - DNA, 72 bp, Homo sapiens
ggtggggctgtggatgctgacagttgggggcccatcggagacagtcccaagcagcatggctgggtgtctgtg

SEQ ID NO: 7349 - DNA, 72 bp, Homo sapiens
caggcccagcgccaggccctgttcacacattctcacgtggggctctcacagagctgagagcagtagaattac

SEQ ID NO: 7350 - DNA, 72 bp, Homo sapiens
ctctccgggtatgtgcccaggagacggggacaacacgttcacagccacaccgtccgtggtgacgcacacgtc

SEQ ID NO: 7351 - DNA, 72 bp, Homo sapiens
ctcttcccacccgcgggtagaaccctccctgttcacgatccttctcaagagatgcacggaggccagccttca

SEQ ID NO: 7352 - DNA, 72 bp, Homo sapiens
acagggataacgcttgggggatcactgtgaggactcggagttatagaaacagctttttgcaagacccagcga

SEQ ID NO: 7353 - DNA, 72 bp, Homo sapiens
tgggtggacggataatctatcatcttatgtaaccgcggagagagaagactaattgtgtaggaggctgacgtg

SEQ ID NO: 7354 - DNA, 72 bp, Homo sapiens
gaagttctgacctagtggtatgcgtgttgaaattgcgtatagggacaaacctgattatctgggtatacacag

SEQ ID NO: 7355 - DNA, 72 bp, Homo sapiens
gggcacaagggcagccacgagctgtttgatttctgcgtccccagcagatggcttggtgcacaggggcagggc

SEQ ID NO: 7356 - DNA, 72 bp, Homo sapiens
caccccatcaagagacgcttccccactaagcttcccgggctcttcccgccgcgcgctgattctcccaggcgt

SEQ ID NO: 7357 - DNA, 72 bp, Homo sapiens
ctgttatttcaccctcttgcttcccataaggcagccgggggtctccactcatccccccgacaggctcctggc

SEQ ID NO: 7358 - DNA, 72 bp, Homo sapiens
agtgtcctgcatccttccagccatggccttgaagccggggttctggcctggacacgtgccactctccaggcc

SEQ ID NO: 7359 - DNA, 72 bp, Homo sapiens
ctgcagaaggcggtggcagctccgcagcaccagtccgctggctggtcgtttgtcttcaggtttcacagcctc

SEQ ID NO: 7360 - DNA, 72 bp, Homo sapiens
aattctcttctgagagggtcagaacaaccctgagtcgtgaccagggccagagctcaagctactcagggaaac

SEQ ID NO: 7361 - DNA, 72 bp, Homo sapiens
ggctggagccctggtctgaaccaggatcctctctccgtctagcgccgcagcgcacctcaggacaagtaatgt

SEQ ID NO: 7362 - DNA, 72 bp, Homo sapiens
agacttccctaaggcccccttctctagtacgcaatcgcggattcaccagcttgagtcagttggcctcagttt

SEQ ID NO: 7363 - DNA, 72 bp, Homo sapiens
actgggataaagcttttgtggccaagacaaattgccgagcacaggtttttgcctcatggccttcgtgcttgc

SEQ ID NO: 7364 - DNA, 72 bp, Homo sapiens
cagactagaggccagaagtccggtgagcaatattacagtagtccaggtgagaggtaataatggcctgcctaa

SEQ ID NO: 7365 - DNA, 72 bp, Homo sapiens
cagagaagtccccaacagctggtgatcttatctgacgtttgattataccaactttgacagttgtatttgtta

SEQ ID NO: 7366 - DNA, 72 bp, Homo sapiens
atccccagttcacttttggccatgcgtttatcagtcgaacacttcctaggaatctctctgtaggctgggagt

SEQ ID NO: 7367 - DNA, 72 bp, Homo sapiens
gggcaggcccggcggacacccctccctctggctggcggatgcagtgcctagcggccgcccttaaggacgaaa

SEQ ID NO: 7368 - DNA, 72 bp, Homo sapiens
tagcttgcgtgactccatctgggtttggtctggtccgttggggcctcttgcgggagctcagtccaaaacaat

SEQ ID NO: 7369 - DNA, 72 bp, Homo sapiens
gatgtagagacattagaacctttatatgcaatgttcgtgggattgtaaaatgtgtaactgctatgggaaaca

SEQ ID NO: 7370 - DNA, 72 bp, Homo sapiens
aaatgctgcagtgaatctcaaagataacaggcacccggctaattctattgggttaacacgtccatgctggct

SEQ ID NO: 7371 - DNA, 72 bp, Homo sapiens
gtttgtgaggcaaagtgtgtcaaagatgattcaaacgtttctagctttggggattgtgtgctgccatcaatt

SEQ ID NO: 7372 - DNA, 72 bp, Homo sapiens
gctcgcccttaacctctcttctagcccagttctagcggcatccaaatgcgctcagagggaggtgcgggggag

SEQ ID NO: 7373 - DNA, 72 bp, Homo sapiens
ttccaccagctatgcaggatgtgcctggctgattccgtgttttggggggcatatttttgtgagaggagtgac

SEQ ID NO: 7374 - DNA, 72 bp, Homo sapiens
ctgactccgggaccgcggacaggcggcaggatccgcgcccagcaaggacttcaggcacgtaggcctaagatg

SEQ ID NO: 7375 - DNA, 72 bp, Homo sapiens
gcgggcatgcccggctcccttccgcggcgccacagcggcttcgagccaggcagagcaaaatccccgaggaaa

SEQ ID NO: 7376 - DNA, 72 bp, Homo sapiens
gtgaatcagccacgcggcctgcccgttagtcacttcgtcttggttaacagctcgactgcagtggtattatgg

SEQ ID NO: 7377 - DNA, 72 bp, Homo sapiens
aactatcaaaaagaatgatttaaacaactatgatacgtcagttgtgaatagcaggaagaattcaaaaggaag

SEQ ID NO: 7378 - DNA, 72 bp, Homo sapiens
tttttgcagttggtttgtttaaatcaggaaccagacgagatccataaattgcatttcttcatgttttttacg

SEQ ID NO: 7379 - DNA, 72 bp, Homo sapiens
ggccccgagtccggagccgtggacggggccctaggcgacaccagggcgccctgactgcggcctcccactccg

SEQ ID NO: 7380 - DNA, 72 bp, Homo sapiens
tgagcccccgtgggttttggtgtgagcacacgtcacggctctgttctccccgatggttttctgtttttcatg

SEQ ID NO: 7381 - DNA, 72 bp, Homo sapiens
gggtgcctgtcatcttcttcttgggaggcggctttcgttttgactttctgcgccccatgtctgcaggtggat

SEQ ID NO: 7382 - DNA, 72 bp, Homo sapiens
agccaggactctgggaggccaaggcaggcggatcacgaggtcaggagatcgagaccatcctggctaacacgg

SEQ ID NO: 7383 - DNA, 72 bp, Homo sapiens
cttattttattgtctcccatggccaagacacttttcgaggattagacacttatttcaaatatcccgggatgc

SEQ ID NO: 7384 - DNA, 72 bp, Homo sapiens
ggggctcccggcgacccgcggtgccgacgcaacgccgacgtatggtgccaagcgaactttaaaaagctgctt

SEQ ID NO: 7385 - DNA, 72 bp, Homo sapiens
ataacaggcacccggctaattctattgggttaacacgtccatgctggctgtgcaggcttatttaagtaattg

SEQ ID NO: 7386 - DNA, 72 bp, Homo sapiens
ggccctgtggaccgccgcccgacccccgagcaagccgtgtgccccgagggcccgacccaagatcacacagct

SEQ ID NO: 7387 - DNA, 72 bp, Homo sapiens
agctgccaaaggtcgcacggcgggaaggagctggccgaagcactgacttggaagtcagacctcatttccagg

SEQ ID NO: 7388 - DNA, 72 bp, Homo sapiens
ctttgaacaaaaaccacaaacaaaaagcctgtgtgcgagaggttggcagggaaagaagggagtcaagtatgg

SEQ ID NO: 7389 - DNA, 72 bp, Homo sapiens
aaaaatgtgagtctgtgtgtctctgtgtgtctctacgtgttattccactagggatttgcacagataggtttt

SEQ ID NO: 7390 - DNA, 72 bp, Homo sapiens
cttccactcccgggacctctggacatcctccatcccggtttggcgggaaactgacccaggagaaagtgtttg

SEQ ID NO: 7391 - DNA, 72 bp, Homo sapiens
cgcggctcttcctgccgcggccgcgccccttctcccgcagccgcccgggaggctccctcactgcttagcaac

SEQ ID NO: 7392 - DNA, 72 bp, Homo sapiens
acactttcctgccttctcaagtcccttcttcctttcgaagacaggcctcatggtcaaatgtcacctccttct

SEQ ID NO: 7393 - DNA, 72 bp, Homo sapiens
ccttcctccctcagggctgcagacccagccagagtcggggcccaggatttagcagtgaaggtggggctcgac

SEQ ID NO: 7394 - DNA, 72 bp, Homo sapiens
aggtggtccagtgagtccaatccctttttttgctgcggcttagacgaggggccgctgaggattctccgaatt

SEQ ID NO: 7395 - DNA, 72 bp, Homo sapiens
tcttgtgaggcctggctaggagtgcctgggatgggcgggacactgcctggggaaggcgggtggggagcggtg

SEQ ID NO: 7396 - DNA, 72 bp, Homo sapiens
cctctgcttgcttctcgttggctaaatcactgtcacgtgctcgtgctagcttgcaagtgtgttgtgggaagt

SEQ ID NO: 7397 - DNA, 72 bp, Homo sapiens
gcatgtgatggggtgtgccaagggccacgcagagccgcgacttccccaagctgctccgggtgtccccggccc

SEQ ID NO: 7398 - DNA, 72 bp, Homo sapiens
gtgtgtgtgtatttaagtgtttgttgaatgggtggcggaactcattggcaatatgctgtttatgttgctggg

SEQ ID NO: 7399 - DNA, 72 bp, Homo sapiens
atcatccgaatttgacaattactgagaatttgttacgaacattttagtaaatgttaaaaacgccaactttaa

SEQ ID NO: 7400 - DNA, 72 bp, Homo sapiens
gacccaaaacaatgacatgtaaacggagtcaggaacgtagcacgcatctcatagaaagcatttcctacacgt

SEQ ID NO: 7401 - DNA, 72 bp, Homo sapiens
aggtctagggctccatacatttcacccagagactccggagcctggcaggcagacctgttctgacaccgaact

SEQ ID NO: 7402 - DNA, 72 bp, Homo sapiens
caaaagggcaaaacggaaaatggagaggaaaaaggcgctggccctttaagtctcctggcagttgcttcagcc

SEQ ID NO: 7403 - DNA, 72 bp, Homo sapiens
cgattatgtttcctccatttccacaggctctcacccgtggggcgggacaccctgcgattacatttcctccat

SEQ ID NO: 7404 - DNA, 72 bp, Homo sapiens
ggcccggctgggcgagtgtctggccctttaagggccgcccccgaggaggtgccaggcccgggtggcgccgtc

SEQ ID NO: 7405 - DNA, 72 bp, Homo sapiens
ttggagatcttgtcagatggcaatcgccgaggaggcggagaaagggagccgcggggagggcggcggggggcg

SEQ ID NO: 7406 - DNA, 72 bp, Homo sapiens
cacacactcacccttctacccggagtggaggcaaccgcctgtttcataacacccaagccagccagtgactgt

SEQ ID NO: 7407 - DNA, 72 bp, Homo sapiens
aaaagaagggaggctggagaaatctggacccgagacgtagtaagtacaacttggcaaatacatgttagagga

SEQ ID NO: 7408 - DNA, 72 bp, Homo sapiens
aagcattaattgaggtctccccaactctcccctcccgtccctctctgcaactcctcccttcccaaaaatatc

SEQ ID NO: 7409 - DNA, 72 bp, Homo sapiens
ccgctggtatcttcctctccctcccaggatagaagcgacaatgtcacaacagggtgtacatcccctgcgata

SEQ ID NO: 7410 - DNA, 72 bp, Homo sapiens
tgtgtgaaggcattagctgccagttgtaactggaacgcagcctagaggcctcactcctccagcaggaagcct

SEQ ID NO: 7411 - DNA, 72 bp, Homo sapiens
tgttcactttcaagagcagggagtagatggcccttcgtggaagtttaattatacagaagagtttgaaaaggc

SEQ ID NO: 7412 - DNA, 72 bp, Homo sapiens
ctctcactcacgggcaggccttgggcaggtggaagcgctggaagcacccacaagtgcaaaagggagcaccta

SEQ ID NO: 7413 - DNA, 72 bp, Homo sapiens
agtccgggagaaggagtggcccatatgtgcagccgcgcctggcgcaggaggcttccagggccggctccctgc

SEQ ID NO: 7414 - DNA, 72 bp, Homo sapiens
ggcttgcctggggttagtggttcctatgcagggcccgttctgtcccatactgggactcctcctcttttgaat

SEQ ID NO: 7415 - DNA, 72 bp, Homo sapiens
aaaaataaagctctcctttctaaatttatgaacctcgttattcttcagttgacagtgtaaaaccatgaaact

SEQ ID NO: 7416 - DNA, 72 bp, Homo sapiens
aagttcaaatgcttcaattcctgaccatttggggtcgtttaaatggaaggaaaggatcaactctctataaaa

SEQ ID NO: 7417 - DNA, 72 bp, Homo sapiens
gttagaatacgtgttaaactcaattcatatgccaacgcgtgcgtaagcaatatgccagttttatagctcaga

SEQ ID NO: 7418 - DNA, 72 bp, Homo sapiens
acacagcgcctcggaagccaggttgctggatgacacggcccatgacgtctcagcaggcctgggccaccttct

SEQ ID NO: 7419 - DNA, 72 bp, Homo sapiens
ttttctgagcctgtccccttctctgtaaacctggacgtgtttgatctacgctcgcgtcccggcaggaggctt

SEQ ID NO: 7420 - DNA, 72 bp, Homo sapiens
cgggagtttgcagaactcagcgggcaccctccccccgatctccagacactgaaggaacagaatgtaaaagcc

SEQ ID NO: 7421 - DNA, 72 bp, Homo sapiens
cagagcagatttttttatcatctcttaacccactccgtgaccacacaggccaactcttagtctgtgtttctt

SEQ ID NO: 7422 - DNA, 72 bp, Homo sapiens
gggtttgggctggtctgccccccaggtgagggttccggaaagacggccggctgctgagtcttctcaagcagg

SEQ ID NO: 7423 - DNA, 72 bp, Homo sapiens
acaggcagagcagagatttaaaagtgccaatgcgccgggtccgcactgtgatctggagagttggaaactttc

SEQ ID NO: 7424 - DNA, 72 bp, Homo sapiens
gttggggcttacggccttttctctcatgtatgagacgagtcctgagttctcaccaatcatcctcaaagtatg

SEQ ID NO: 7425 - DNA, 72 bp, Homo sapiens
aaggccccatagggccagcatcactacctcagtcacgctggccacaccctctgtcaagctttggcttggcag

SEQ ID NO: 7426 - DNA, 72 bp, Homo sapiens
aggaatagtcacttcctgcctttgtccattagcgccgaccaacgcgaccagctccgtttacattctttcagt

SEQ ID NO: 7427 - DNA, 72 bp, Homo sapiens
tcgattctgatagtgggcgcaagcagagaggaaaacgagagcagtaagcgtgtattcacagtggagtctgta

SEQ ID NO: 7428 - DNA, 72 bp, Homo sapiens
catcaccacgaggaaggcaccatgcatgagggatccgccctcgcgatgcagacacctcccttaaagccccac

SEQ ID NO: 7429 - DNA, 72 bp, Homo sapiens
ctttataacctgcggatgtccgcctccgagaattccgttaattccacaacgtcaagcccagggtcttacgga

SEQ ID NO: 7430 - DNA, 72 bp, Homo sapiens
ccacactgtcccccacaccccatggcagagggcagcgtgcttgctgtggccacaggctgcataaaggggcct

SEQ ID NO: 7431 - DNA, 72 bp, Homo sapiens
aatgatcatcggcagtgccagggaagcaggcaggtcgtgggggcctgccttgcccactgctggtgctgatct

SEQ ID NO: 7432 - DNA, 72 bp, Homo sapiens
cgtccctggaaagggacaccaaagatttccaattccggagagcgggcccgaggaagggtcactgctcgggcg

SEQ ID NO: 7433 - DNA, 72 bp, Homo sapiens
ccaacgggcaggtctcagcgctcctccccctgctccgctcctctgcagggcccaggcgcccttggccttagg

SEQ ID NO: 7434 - DNA, 72 bp, Homo sapiens
ccattccattgaattcagccttgcctaattgtggccgattgccaaatccctagcatgtttcctcttctgaat

SEQ ID NO: 7435 - DNA, 72 bp, Homo sapiens
cctctggcacctagaaccaagtcaccctgagccagcgccagagttcctgcccactcgtgagtaggacaacat

SEQ ID NO: 7436 - DNA, 72 bp, Homo sapiens
ctcagttcttcaccctatgggccttcccataggctcgagtatcctcacactgtgacagctggctttctccag

SEQ ID NO: 7437 - DNA, 72 bp, Homo sapiens
tttgtaaataacaagaggaaagaaccttcttatgacgtcggccttatgacgttggcctgggtcccaagaagt

SEQ ID NO: 7438 - DNA, 72 bp, Homo sapiens
ccctcacccacaccctagccatctccacttagtcacgcatttggctcccaacctgggtgggaccaaacctca

SEQ ID NO: 7439 - DNA, 72 bp, Homo sapiens
cttcccggcgcggggctcgttccctgaggccaggccgctcagtggccgcaagagcgaccttcccacatgtcc

SEQ ID NO: 7440 - DNA, 72 bp, Homo sapiens
cacttctgcagtcctagccagtaagaactcaagctcggacccaaggctgtggaggcctccaagatcctccat

SEQ ID NO: 7441 - DNA, 72 bp, Homo sapiens
ggaaacaggctcatgcacttccacgcagggagggccgacggtcaagggtggaggaaaagccacaatttttcg

SEQ ID NO: 7442 - DNA, 72 bp, Homo sapiens
aggggacctagtcagggtcttgggagctaccttgtcgttgggaccagagcaaaatagtggagggcaggctag

SEQ ID NO: 7443 - DNA, 72 bp, Homo sapiens
agataagaggcttgtctggctgtgaggtccttgcacgagacccttgcaggtttcccaaatctatttggactg

SEQ ID NO: 7444 - DNA, 72 bp, Homo sapiens
aacgcctaacttaggtctactaaggtgtagaaatacgcaaggctgcccctagagaacgtttgtctggggaat

SEQ ID NO: 7445 - DNA, 72 bp, Homo sapiens
ccaggctccgaggatggtactgaacctggcgcagccgtgggagggtgaaccaggtgccgctggcggagcccc

SEQ ID NO: 7446 - DNA, 72 bp, Homo sapiens
aatgcctaccaaaacaatggttcacaaaggccacacgttatatgaaatgtccagaataggtaaaaccataga

SEQ ID NO: 7447 - DNA, 72 bp, Homo sapiens
cttaaaagtttctgggaggccttgccttttttacccgaggaagaagtgaaaatgcgtcttgcacaattgctt

SEQ ID NO: 7448 - DNA, 72 bp, Homo sapiens
gaaaaggaaatcaggaacagaggctgagccagccacgggtggccccaggggacatcatcatgaacatgaagc

SEQ ID NO: 7449 - DNA, 72 bp, Homo sapiens
cctgcagcttctggagaatggttttgcctcctccccgcgacatcaactaactcacttgctgttagctaaggg

SEQ ID NO: 7450 - DNA, 72 bp, Homo sapiens
agtaaattgttgtcaaaatttaacaggcaagagtgcgtaggttaattacaggaagtttttagtttaggaaac

SEQ ID NO: 7451 - DNA, 72 bp, Homo sapiens
acctttggctaggccactcgatgttgcaagaaacacgtccatcagcaattgcctcagtagaaaactccctct

SEQ ID NO: 7452 - DNA, 72 bp, Homo sapiens
aaccttggagagtggggttcccctcacacgttgggcgcactgccaacatccttccttcagacatacacataa

SEQ ID NO: 7453 - DNA, 72 bp, Homo sapiens
cacgtgctcacttgagatatttcagaagatacaaacgcaaagacaaacaaaaaaccacccagcacctcagtg

SEQ ID NO: 7454 - DNA, 72 bp, Homo sapiens
gcgaggaggctggtttcccagaccccagtgctctccgcattccgtttgtctccaagtttccacccaactctg

SEQ ID NO: 7455 - DNA, 72 bp, Homo sapiens
atgctgctgctgtcacagccattccacatcatctacgttatagactccacctaatttttttaaactagacca

SEQ ID NO: 7456 - DNA, 72 bp, Homo sapiens
tgccagattattacgacacgccactatgacccagccgagctgtttaacaaataaactaaccacaaaagactg

SEQ ID NO: 7457 - DNA, 72 bp, Homo sapiens
gaggaacagtataccaggaaactcctcccaccccacgacatccagctgctcccctataaggtcccacccccc

SEQ ID NO: 7458 - DNA, 72 bp, Homo sapiens
cttctgccaggaatattaatgccaaccacctctgacgtctaataaatgcagatgaaacaaccaacaatcaca

SEQ ID NO: 7459 - DNA, 72 bp, Homo sapiens
cttggcagggtggggtcccctgggaaaccaacgctcgcctcacagtgagctcagagcgaagtcctggttcca

SEQ ID NO: 7460 - DNA, 72 bp, Homo sapiens
actgagggcagggacctgcccaggggtgctgctgacgtttgagatggagtggttcttcacagcacagaagtg

SEQ ID NO: 7461 - DNA, 72 bp, Homo sapiens
ttccggtggtcggagctgcaaaattaaaggccgcgcgggggcagcgccggcggctgctaggctgactccgcc

SEQ ID NO: 7462 - DNA, 72 bp, Homo sapiens
tctttgggtcagggcaccatcatatctggagacaacggcgggactagtctattcgttgaatacctagtgtta

SEQ ID NO: 7463 - DNA, 72 bp, Homo sapiens
ctcagacttgcatctaattctttctccagatctaacgcctctgtttctacacccaggggaacctctccccag

SEQ ID NO: 7464 - DNA, 72 bp, Homo sapiens
ttaggaatttgatgtgcaactggaatgaggccctgcgaggcctgagagggaactgaccctgaaagacgcttg

SEQ ID NO: 7465 - DNA, 72 bp, Homo sapiens
gccagaggcaggggctctccaccggcagcagcgagcgcctcgcctgctgtgacaactctgtctggctctggg

SEQ ID NO: 7466 - DNA, 72 bp, Homo sapiens
ttctgaatgtcatgaagtccaggaaggaagaagcacgtagagatgaaggttaaactacagttaggcaaaaga

SEQ ID NO: 7467 - DNA, 72 bp, Homo sapiens
tacagcacaactcaagtttgcatcagactgggaagcgaacttaagccagcggtgcgtggcccaggagtggga

SEQ ID NO: 7468 - DNA, 72 bp, Homo sapiens
ctcgctccacccgcattcccttcccagttccgccccgcagccgctcactcacctccagacccagagccggcg

SEQ ID NO: 7469 - DNA, 72 bp, Homo sapiens
accagcttgtaagccgctctaactcattgttctctcgtagcctggtcacccttggctcaggggtgaggttac

SEQ ID NO: 7470 - DNA, 72 bp, Homo sapiens
ttgggattataggcgtgagccactggcgcccggcccgctgagggttgtaatctgcacctgtcaccagtgtgg

SEQ ID NO: 7471 - DNA, 72 bp, Homo sapiens
cagccagccatgctctgctgctcctactcccttcccgggacctgtccctgatgtcataactgggtaactatg

SEQ ID NO: 7472 - DNA, 72 bp, Homo sapiens
caaaacgtccagagcctgccagttttagaaggcgacggaggtagttgggggagctggaatcctgcgaagacc

SEQ ID NO: 7473 - DNA, 72 bp, Homo sapiens
gaccctttgttagtttctacttttcacaaccacatcgtctcttctcagctgctcttttatcaactgaaaatt

SEQ ID NO: 7474 - DNA, 72 bp, Homo sapiens
ccccctccctccgcccttggaggcacccgccggatcggactcactcgagctggtaggagaagctgtagttgc

SEQ ID NO: 7475 - DNA, 72 bp, Homo sapiens
ctccgtaatctgcagcagtgggcgtctaggttccacgctggacctgccctccctcaccaggcccccttgcca

SEQ ID NO: 7476 - DNA, 72 bp, Homo sapiens
aggctggtgggagctgcagttgttggcgggatatgcgtgcccagcccccttacacagcctgtgcaggcgggt

SEQ ID NO: 7477 - DNA, 72 bp, Homo sapiens
gagtcaaatgggaatgaggctggttagtgaacaatcgtcataagagggtcacttgaatttctagcttgcagg

SEQ ID NO: 7478 - DNA, 72 bp, Homo sapiens
tttatcagcttctggagttttaaaaaaaatatcaacgggtgttgaatattttgagtgactttgctgcatcaa

SEQ ID NO: 7479 - DNA, 72 bp, Homo sapiens
cttgctcggggcttccaacttctacgccccagtgacgagaaagtcaggacctgtggtgtatgaaatagattc

SEQ ID NO: 7480 - DNA, 72 bp, Homo sapiens
tggccaggcagctttctggggaccaccggcaccgccgccatcagaactttggggtgtttgagcctctggcaa

SEQ ID NO: 7481 - DNA, 72 bp, Homo sapiens
acagtgggaggtcagtacaaacctaccccaaaggccgaggaagctgagaggttgaagaaagaggctgacaaa

SEQ ID NO: 7482 - DNA, 72 bp, Homo sapiens
ctgctcgcctcgcgccgccctcggctctgcggactcggatcccgccaaatttgaacgcgagattgtcaggcc

SEQ ID NO: 7483 - DNA, 72 bp, Homo sapiens
ccctgccctgcccaaccccccaacgctgcccgctgcgcccccgcggggcccagccagatgtcagctgcagtt

SEQ ID NO: 7484 - DNA, 72 bp, Homo sapiens
ctgtcactgtctcagagcccccgaggacgcatccacgctggctcacacaccgtggctcacagcagacaggcc

SEQ ID NO: 7485 - DNA, 72 bp, Homo sapiens
gaactccctgcacacacttatgacactgtgcaggacgaagaagcagggacagaccattgacagagccacttc

SEQ ID NO: 7486 - DNA, 72 bp, Homo sapiens
ccaggcaagaagggaacaagaggacatgctggtcacggcttgttctctacgtatgccatctaccacaccaag

SEQ ID NO: 7487 - DNA, 72 bp, Homo sapiens
ctaccagagagcggaagccaaagagagttcccaatcgcttccctcagagtcctctgctggagatggaaaaac

SEQ ID NO: 7488 - DNA, 72 bp, Homo sapiens
taattacagctgtacttagtgccaactcccaggcacgcctccaagcaccacaaacttcttgcccccccacaa

SEQ ID NO: 7489 - DNA, 72 bp, Homo sapiens
gagggaagttgattgactgtaaggtttgcggtggccgctaggcgatgacaatcagcgaaggtctcttagatt

SEQ ID NO: 7490 - DNA, 72 bp, Homo sapiens
tgcgggctagaggcgcacacgtttcatctaggcttcgggcggggcgcagcaggtgggtgaggctgcggtggt

SEQ ID NO: 7491 - DNA, 72 bp, Homo sapiens
tgataccgttccatgtacagtcatacgttgcttaacgacgggctgtgttctgagaaatgtgtccttaggcta

SEQ ID NO: 7492 - DNA, 72 bp, Homo sapiens
cctccgggaaagctagctgctcgggaaacgccaatcgaattagctcagagaagagtggccgtggccttgtgt

SEQ ID NO: 7493 - DNA, 72 bp, Homo sapiens
ttcctacagttactccatcttttgtaggaactaatcggagctggtgttctctagcacacactttttggcagc

SEQ ID NO: 7494 - DNA, 72 bp, Homo sapiens
acgttggtgggttttccgggacaaaggcccctcctcgacgcagggttcgcttgggcgacgcgtcgactctcg

SEQ ID NO: 7495 - DNA, 72 bp, Homo sapiens
cattgcccatggagccaggggagctgtgggccttccgccgccaacctctgggctagccctgcagagatgcta

SEQ ID NO: 7496 - DNA, 72 bp, Homo sapiens
tactggtaacctatcataagcaatgatgagcactacgaaccatcaacatccatttctaggaaatccgattct

SEQ ID NO: 7497 - DNA, 72 bp, Homo sapiens
ctatgcacatatccagccgcgtaaatgatctcatacgaattataggcacggaggaggtaagcaaaaagtgtt

SEQ ID NO: 7498 - DNA, 72 bp, Homo sapiens
aggatgaaggaggatatttgctgtgaaacactttacagcagttagaaacatgggaaggatgaacacagagca

SEQ ID NO: 7499 - DNA, 72 bp, Homo sapiens
ttcagttcgagcgccaagattgtgaagcccaatggcgagaagccggacgagttcgagtccggcatctcccag

SEQ ID NO: 7500 - DNA, 72 bp, Homo sapiens
gctttttccggggcaaaacctctgccttggattcacgcatgttcctgtccacattccccacgagttgctctc

SEQ ID NO: 7501 - DNA, 72 bp, Homo sapiens
cagctttctttcatttggtcacttcacctcttcatcgaccccagagagggagtggggaccctgcatgctgcc

SEQ ID NO: 7502 - DNA, 72 bp, Homo sapiens
tctcaataatttggtgaattagtcattcagtacagcggcctggttttagtcctgtcagagggagggaggact

SEQ ID NO: 7503 - DNA, 72 bp, Homo sapiens
gaaaactagcatactgtggtatcacagaatatcagcgtgattgctcaactgtcattcactgaggtacatctg

SEQ ID NO: 7504 - DNA, 72 bp, Homo sapiens
ggaaagagggatgtgagggttttctttgttgttttcgtttaactagggtagtttcctgtctgagtttgagtt

SEQ ID NO: 7505 - DNA, 72 bp, Homo sapiens
tctccttatcttgaagggaagcccagtgcatccctcgtttccccttctggtgcctccttcctcacatgactg

SEQ ID NO: 7506 - DNA, 72 bp, Homo sapiens
ttgacttaagcctgcttggtggcgaggcagctgagcggatgtggggggtggccggcggcgctcaggaatgcg

SEQ ID NO: 7507 - DNA, 72 bp, Homo sapiens
tttcacagtgctaatatttgtttaaggttgcttaacgttgttcctctcctctagaactttggaagtaaaagc

SEQ ID NO: 7508 - DNA, 72 bp, Homo sapiens
atgctgagaaaatagcatgggagccctgcaggaaccgtgccatcactgtgtttctcttatctgagctcggtt

SEQ ID NO: 7509 - DNA, 72 bp, Homo sapiens
ccaaaacaaagcattatggttctatgaggatctcccgaagaaaagatgtcaggaaaggtgcagagaccctcc

SEQ ID NO: 7510 - DNA, 72 bp, Homo sapiens
aggatcttcgtcatcatcttcctggtcatcctgtccgtcttttgcatctgtggcctggctaagtgcttctgt

SEQ ID NO: 7511 - DNA, 72 bp, Homo sapiens
gtcgcaggaaggaaatgcttctggacatgcgcagccgaccatgaccccagccacggcaggaggcctcgagga

SEQ ID NO: 7512 - DNA, 72 bp, Homo sapiens
ataaggggatgggtgtggctgcaggtgggacatgtcggttctctgtcctgtcacagctaagaactaagaact

SEQ ID NO: 7513 - DNA, 72 bp, Homo sapiens
acaaagggtgctttttgaggaaatgaatttaaaagcgggggggcacgcatagagacagaccttgggaaagta

SEQ ID NO: 7514 - DNA, 72 bp, Homo sapiens
atgcagatgtcagagtgtgtttttaataatttcctcgaaacctctgcctggcttcccagcatgtttaagatg

SEQ ID NO: 7515 - DNA, 72 bp, Homo sapiens
cacattccttccttctttttcctgtgtctgggcatcgagtagtttgaaggagctctcttttgtggcagtgtg

SEQ ID NO: 7516 - DNA, 72 bp, Homo sapiens
cccctcgttacactaggcatcccagccaactgcctcgtggaagttgtttttgtaaaccttctagtagtgctg

SEQ ID NO: 7517 - DNA, 72 bp, Homo sapiens
gccaactactaagtaactaacggggcaggttgcatcgacagtttagagacactggacaaagggatgattcac

SEQ ID NO: 7518 - DNA, 72 bp, Homo sapiens
ttagtaacacggacaaggctcctcgccaaggaactcgtggcagaagagggcagcagttggcagtagctgccg

SEQ ID NO: 7519 - DNA, 72 bp, Homo sapiens
tcagcaaattccatccttcaaagcagaaggagggacggccttgtgtgtgtgactctgtgggttgtctctgca

SEQ ID NO: 7520 - DNA, 72 bp, Homo sapiens
aaatattgaacttggcctgccagcaccacgagagtcgtcccaactgtgattttattgcttgagtcactccct

SEQ ID NO: 7521 - DNA, 72 bp, Homo sapiens
acaagcaggtcagcggttgctgggggactcgaagacgcaccctggtctgcttgaggacgcctcttttcacac

SEQ ID NO: 7522 - DNA, 72 bp, Homo sapiens
gaatggagcctccctggtgtgagaagtgcaatccacgtggttggggtgtaggtctccctcctgatctaagag

SEQ ID NO: 7523 - DNA, 72 bp, Homo sapiens
aggcacaaagctgcagttttgagaacatcttcccacgccagttctaagcattgacttcaactatggttgcta

SEQ ID NO: 7524 - DNA, 72 bp, Homo sapiens
ggcggctgaggccccgcgagaattcgagcgcagcgcgggcgggccggtagtgctgggtatcccagcccaccc

SEQ ID NO: 7525 - DNA, 72 bp, Homo sapiens
ctcttaactacacaagggaatcaggcttaacaacacgctcagcagctgtgtgactatggccaatttgcttaa

SEQ ID NO: 7526 - DNA, 72 bp, Homo sapiens
cactgcaggccgtggcagccaatgggagccgaaggcgggggtggcagggctgccaggcctgcacacagggct

SEQ ID NO: 7527 - DNA, 72 bp, Homo sapiens
gtccgctgtgcacaggccatgggggcagcatgggccgcttccgaccttcagcttcataatgttgatttctcc

SEQ ID NO: 7528 - DNA, 72 bp, Homo sapiens
tctgctcctggggagccctgggaagggcgattccgcgttgcctctaagaacttctttcctaccccacttccc

SEQ ID NO: 7529 - DNA, 72 bp, Homo sapiens
tgaatgaattacaccatttcattttagacaagctacggtacatacaaaacaagtgtgtggagggggttgggg

SEQ ID NO: 7530 - DNA, 72 bp, Homo sapiens
tggagccctcggacactttaaggatcactgcactccgaattggggtgtatcttcctccaattcttgcctaac

SEQ ID NO: 7531 - DNA, 72 bp, Homo sapiens
tcttatcagaacaccagcctgatgggaccatgccccgcccggtgacctccttctaccctgatgatctcctta

SEQ ID NO: 7532 - DNA, 72 bp, Homo sapiens
cccgtggtggcgacaggaggaataactagctaatgcgaggaaagcttttgaagatgaaagggtggtatgtgc

SEQ ID NO: 7533 - DNA, 72 bp, Homo sapiens
ctggcctttccccttcagatgccaaatgttccaaacgacaggtacaactctgagagggccgttaaggttcat

SEQ ID NO: 7534 - DNA, 72 bp, Homo sapiens
gcggtgctgtgcactgtgaactgttcagcagcatccgtggcttctatcaaccagaagccactatcgcccccc

SEQ ID NO: 7535 - DNA, 72 bp, Homo sapiens
agcccaaggctctgcaaatcactgccacttcatcacggctgcagccacccttgtgcaggccccagctcgagg

SEQ ID NO: 7536 - DNA, 72 bp, Homo sapiens
caagagctcggggtcatcccctgggccgtgccttccgggtctaggcccctgattctcctcaggctctcttgg

SEQ ID NO: 7537 - DNA, 72 bp, Homo sapiens
tatatagtggagtttctgggccacaccctgggccacgtgccaggcagatgatgccaacttcctggaggaggc

SEQ ID NO: 7538 - DNA, 72 bp, Homo sapiens
acttctgcagcaacagggtccccgcaggccactgccgtcacagctggcggccccgcctgtgtgtgccagatc

SEQ ID NO: 7539 - DNA, 72 bp, Homo sapiens
ggtgagtaagaatgagggggtggtagggtcgtgggcgggaataactgtagaggaaggacaaggagaaggaaa

SEQ ID NO: 7540 - DNA, 72 bp, Homo sapiens
tttggcagcagagtgaagtgtgtgcacagggatggcggatggaggaaactctgcagaagaattcaggagtga

SEQ ID NO: 7541 - DNA, 72 bp, Homo sapiens
tcattcttggggtcggaaagaaacacacattaaaacgccagcctcgtacgcggagtacattcgcagctaaac

SEQ ID NO: 7542 - DNA, 72 bp, Homo sapiens
catacaattgctttagggtcttcctcataggaagccgtgagtaacagcaggaacatccattatccacacttt

SEQ ID NO: 7543 - DNA, 72 bp, Homo sapiens
tctttagaaccgaaccactttcctctcgcctcccacgtcctcactaagttactcggggaccccaaggaacca

SEQ ID NO: 7544 - DNA, 72 bp, Homo sapiens
tctccattaatcagtctgccccaaagaagcttttccgtatttcacaggatccttagaagaggccagctaact

SEQ ID NO: 7545 - DNA, 72 bp, Homo sapiens
catgaagcggggagaacgggtgctgctattaagcacgttctctggttttctgtcgccatgtgcgctgtggtt

SEQ ID NO: 7546 - DNA, 72 bp, Homo sapiens
caataaaaagtggccaggctaacagaggagcgcagcggggtctggccggttcaaagtccaaactccacaccc

SEQ ID NO: 7547 - DNA, 72 bp, Homo sapiens
tgtattacaacagaggcactatttccaccaagcaacggcttcctggtctccctaaagaccaccagaggagaa

SEQ ID NO: 7548 - DNA, 72 bp, Homo sapiens
gggcgtttctcccatgggaggtgctctgggtcctacggacagcccgctcccaggccagggggaggagctttc

SEQ ID NO: 7549 - DNA, 72 bp, Homo sapiens
tatgttctaatttggtttatgctctacgatgtcttcggtaagcaaatgtaacagcttggtttcatctacgat

SEQ ID NO: 7550 - DNA, 72 bp, Homo sapiens
gtaacactcagtggtgtccctgccttcctggaatgcgcgttaacaattctgattcttactcatggcaataac

SEQ ID NO: 7551 - DNA, 72 bp, Homo sapiens
agcgcaaccgagggccagtggcgcaatggataacgcgtctgactacggatcagaagattctaggttcgactc

SEQ ID NO: 7552 - DNA, 72 bp, Homo sapiens
agcccttttgataacactgattacatttccctcaccggagccttgggttaattgagcaacagccaacttctc

SEQ ID NO: 7553 - DNA, 72 bp, Homo sapiens
acgatatgactccccatacagcaggaggtgtacaccgatcctgggatattattcctaatatccacggagagg

SEQ ID NO: 7554 - DNA, 72 bp, Homo sapiens
gtcgcccaggccccgccccgttccccgccccgccgcgccatgcccagccgagtagctttacggttctcccac

SEQ ID NO: 7555 - DNA, 72 bp, Homo sapiens
ttgaaacaattctcgtgtaaaaaggcattttactccgcgcgtcttccttacagccatttagttgggagtttg

SEQ ID NO: 7556 - DNA, 72 bp, Homo sapiens
agtcattcgcatgaattgttgggctcatcattttacggtgcgatgccgtcttaggcgcagagcgtctcactt

SEQ ID NO: 7557 - DNA, 72 bp, Homo sapiens
ggacttgtccccagaggtggagtccgaagtgggggcgccccagttgacccttcgggacaaaacgtgacttca

SEQ ID NO: 7558 - DNA, 72 bp, Homo sapiens
ctgactctgcttctccttccaccatgcattggacgcgtttgcagtgcaaacggtgatttactgggaatgttt

SEQ ID NO: 7559 - DNA, 72 bp, Homo sapiens
gttgaggcattgtcccccttttatagacaaggaaacggaggtttcgagagtaacctgttttgcgcaagatca

SEQ ID NO: 7560 - DNA, 72 bp, Homo sapiens
cctgtgacctggcttacccctttaaagatgggccccgttcacaggaaaacaaaatatatgttgcctaaattc

SEQ ID NO: 7561 - DNA, 72 bp, Homo sapiens
cctccctacatcgttagtccgaggagagggtccctcggtgcccagcacagtgcgtggcacagtcggtgctca

SEQ ID NO: 7562 - DNA, 72 bp, Homo sapiens
gcttcttcagcctgtccactagctaggcttacaagcgtgggaccccgcgcctggctgaagagaggtatcatt

SEQ ID NO: 7563 - DNA, 72 bp, Homo sapiens
ttcttggcctggaggggccatgagagtgcaagacacggggccgtggccggggcggggctacgggagcggggc

SEQ ID NO: 7564 - DNA, 72 bp, Homo sapiens
atgactgaaccgccccttctcagcaaaggccaacacgtctttctcgagtccaagaccatctcccgttcaagg

SEQ ID NO: 7565 - DNA, 72 bp, Homo sapiens
gaggctgcgaccgccgacccgggcagtgaaggggacgtcgtcctctcgcggacggggctcctcctcgctggg

SEQ ID NO: 7566 - DNA, 72 bp, Homo sapiens
tgtgtcaagtcagtaagggggcctctggtatatcccgatgactcaggcacaggcaggggggatgtggccaga

SEQ ID NO: 7567 - DNA, 72 bp, Homo sapiens
ttctccagatgccagctcttccccagaagcagctgcgtctcagcaggggccccttttatcaatgtgacaacc

SEQ ID NO: 7568 - DNA, 72 bp, Homo sapiens
tctgttcattcatctgttactatacagggacaaaccgtgatctattagcactgggttactgtgggtaggatg

SEQ ID NO: 7569 - DNA, 72 bp, Homo sapiens
cgtgcgtcctggcgcgccgcacccgcctggtgcctcggccctctctgctgttccctggctgattctgagcaa

SEQ ID NO: 7570 - DNA, 72 bp, Homo sapiens
gtagaggaggagaggccaggagctccctgagccagcgctcccacagaaggaagttcatcagaaaatcacaga

SEQ ID NO: 7571 - DNA, 72 bp, Homo sapiens
aaaacatcattcatgatttctttaaccagaaacaccgctcctatacctgggaataaccctcattgtaatttt

SEQ ID NO: 7572 - DNA, 72 bp, Homo sapiens
gggtaccaaggaggactgcctggaggtggtggccgcggtgactgctccaaacccgttcggccctgtgcagaa

SEQ ID NO: 7573 - DNA, 72 bp, Homo sapiens
ggcctatttttgctgccttcccatccatgcttggacgccaccctccaggaaggccaggcagctctggatctg

SEQ ID NO: 7574 - DNA, 72 bp, Homo sapiens
atccaggaaggaaacgaattacccttttcctgccccgcctcctgcctgggccacaaaggcagggccaaagcc

SEQ ID NO: 7575 - DNA, 72 bp, Homo sapiens
tcaaccttgtttacaggaaaccgtgccataatcgtcgcttgctgtttcctttctcttgtatcacctccttct

SEQ ID NO: 7576 - DNA, 72 bp, Homo sapiens
tagactggctttctcgggttgctgtgtccctagcacgggtaataaggcttttccatgatcattctgcctcat

SEQ ID NO: 7577 - DNA, 72 bp, Homo sapiens
gaagctagcccgacaccctcagctgagtcctccgccgtcccagcattccctgcgtccctaccatcgagagca

SEQ ID NO: 7578 - DNA, 72 bp, Homo sapiens
gagggatttcggtggtttctttcacctaaggcaatcggattggctgacatagctaagctaagtaaaaataac

SEQ ID NO: 7579 - DNA, 72 bp, Homo sapiens
acacttcgaaggagccccgaggacgctctcagggccgctttcgctttgctttccttttgcttgtctttgctt

SEQ ID NO: 7580 - DNA, 72 bp, Homo sapiens
ggggacagagaggatcaggatgttgggttgtgacacgcgagagagccccatctgtccctggctgctccgctg

SEQ ID NO: 7581 - DNA, 72 bp, Homo sapiens
cttccgttgtagtgtgaaagcagccacagacaaatcgtaaatggatgggcatggctatgggccagttaaact

SEQ ID NO: 7582 - DNA, 72 bp, Homo sapiens
ggacaacagcaggttcagaaggataagtgcagatacgtaggtatacacaagatgcgaccaaacagcacatca

SEQ ID NO: 7583 - DNA, 72 bp, Homo sapiens
ttggtcttctataaaaccatgctgttgaccgggcgcggtggcttatgcctgtaatcccagcacttcgggagg

SEQ ID NO: 7584 - DNA, 72 bp, Homo sapiens
gtcccagagaagcagatgtcttgggggagcctccacgggtgtctgtggtcttgactgtgctcttcagatctg

SEQ ID NO: 7585 - DNA, 72 bp, Homo sapiens
aacagctcaaggttgcatttaggagactccagcctcggccgcccgtgactcctcgacgagccccacctctct

SEQ ID NO: 7586 - DNA, 72 bp, Homo sapiens
caaaagctttgttgccacacatggtcgtggtgagtcgactgtttgaaaagctgcttgcacagagccagacac

SEQ ID NO: 7587 - DNA, 72 bp, Homo sapiens
atctgattacaacagagctaagtatttttcagcaacggttagactgacattgtaaatacacaatctgatagt

SEQ ID NO: 7588 - DNA, 72 bp, Homo sapiens
ctgtggacatggccttgagatccccgggaaagccccgccccccagaatctggttacgtgaggctcagccttc

SEQ ID NO: 7589 - DNA, 72 bp, Homo sapiens
aggctgcagtgagctgtgatcacaccattacactccgacctgggtgacagagcgagcccctgtctcaaaaag

SEQ ID NO: 7590 - DNA, 72 bp, Homo sapiens
gccgccaccttcatttcagactcggcttccagaaccgcaggaggacacagttctgtggctatgaaccacccg

SEQ ID NO: 7591 - DNA, 72 bp, Homo sapiens
tgcaggcgggtgggactcagtggtgtgtgtgtgtgcggcgagtgcctgcctgtaggtggccccggccaagcc

SEQ ID NO: 7592 - DNA, 72 bp, Homo sapiens
tgtctatgagaccttggacaagtcatttaaccttccggagcctactaaaaacaatcattttctcatgagttt

SEQ ID NO: 7593 - DNA, 72 bp, Homo sapiens
ccaacgttgcactctcagactccgcaaaccccgcccgatttggttcaattaaagttgaccagtatttgttcc

SEQ ID NO: 7594 - DNA, 72 bp, Homo sapiens
ccggacggccctcggtggaggaatattctccctgacggcccgcggtggaggaatattgtaccggacagcccg

SEQ ID NO: 7595 - DNA, 72 bp, Homo sapiens
ggtacccagagcaagggcccttcacagccagagagcgtcagggggcttcccagagctctctaacctgggacc

SEQ ID NO: 7596 - DNA, 72 bp, Homo sapiens
ggggcccacgctcccctggagcagtggctggagcgcgggcggagaaagaagcgctctggacttggagtgcag

SEQ ID NO: 7597 - DNA, 72 bp, Homo sapiens
aaactttccatcacccagcagctggcttgttctcacggccagctgtgaggcagggatgccttgagccttcct

SEQ ID NO: 7598 - DNA, 72 bp, Homo sapiens
agctctcccaggcctgactcagcagatgccagccccgaccgcgggcttcagatccaggatcccagcgaccac

SEQ ID NO: 7599 - DNA, 72 bp, Homo sapiens
ctctttatagatgaggaaaccatacaggatatgtacgcctgtttggactttgtacagttctctgtccagcag

SEQ ID NO: 7600 - DNA, 72 bp, Homo sapiens
aataaaacaacccgggcttcgcaatgggagaacttcggtgcggcgtgccgtgagagtcctttgacaatctca

SEQ ID NO: 7601 - DNA, 72 bp, Homo sapiens
cagcctgtccctgacatgtctctgtgctttgtaggcgggggcacgaacagcatcaccgtgaggaatgccaca

SEQ ID NO: 7602 - DNA, 72 bp, Homo sapiens
ttggaaaattgcctatttccctgtctgtcagccaacgctagatcccactttcaggagcttcttaggagactc

SEQ ID NO: 7603 - DNA, 72 bp, Homo sapiens
aactcccggccttcagctcttgccctccgggtctccgggctccgcacctgcgcccgcccccggcctcgcccc

SEQ ID NO: 7604 - DNA, 72 bp, Homo sapiens
gtgagaggctctctggtgtagggtttaacatggaacgtagttttgtcacttgaatgcacggaaattggcgtt

SEQ ID NO: 7605 - DNA, 72 bp, Homo sapiens
cgggccggggctatttctcatttatttcgcacccccggttcttagtgccctgtaggtgctaaatcagcattt

SEQ ID NO: 7606 - DNA, 72 bp, Homo sapiens
tgacccagagaatgttcccctttgcccaagcaggacgaatgccaacgcccttggcagccggcgtcgctcacc

SEQ ID NO: 7607 - DNA, 72 bp, Homo sapiens
gatttattgcaggagtactttgggaaagaaggacgcgtgctgctctgaggaactgggaccacaccctggtgc

SEQ ID NO: 7608 - DNA, 72 bp, Homo sapiens
aaaagccatggctctccaacgggcatccacactcccggctaagcaaaggctctgcaaagctggggccagaca

SEQ ID NO: 7609 - DNA, 72 bp, Homo sapiens
tttaaccattcatccagctctacagagcacaaggccgactacagaattagtttaaaagaaaaaaaaaaaatt

SEQ ID NO: 7610 - DNA, 72 bp, Homo sapiens
cgcagcccattccgcctggcacgactactgggccgcgtcttgtcagtctatcagcttctgagcccaggaatg

SEQ ID NO: 7611 - DNA, 72 bp, Homo sapiens
tttcctcagtaagatgtgcgctgttccgtaatacacgacatgtatgggttaactttctgtttacccttcact

SEQ ID NO: 7612 - DNA, 72 bp, Homo sapiens
atcctccaagctgcctggtgatgaaggagcattaccgggcttggggaccatccaatcccacacccaagaggc

SEQ ID NO: 7613 - DNA, 72 bp, Homo sapiens
gtagggagctgtattgcaaagggggctgatgagcgcggcttgacgcccctacacaccccgccaagggggttg

SEQ ID NO: 7614 - DNA, 72 bp, Homo sapiens
gaaactgagtaaatgaactcacccaggggtcctgccgctcgtaagtggcaaagccaggattcagttcaagtc

SEQ ID NO: 7615 - DNA, 72 bp, Homo sapiens
cagtccccagctcctgagcacatggagtcagaactcgaatttgagcttatcggcccaagcaaatcaacaagt

SEQ ID NO: 7616 - DNA, 72 bp, Homo sapiens
ctgggtcttctccttcctgaatttgcaaagccaggcgaaggccctcgtgctctcccagagagctgcgctcca

SEQ ID NO: 7617 - DNA, 72 bp, Homo sapiens
ttgtggtttattacacacagtgatctccatctacacggaaatggaaggcaagcagccaggatggagctggtt

SEQ ID NO: 7618 - DNA, 72 bp, Homo sapiens
acacacggcaccgggaaaatcgggtcactcccacccgaatactgtgcttttccgacgggcttaggaaacggc

SEQ ID NO: 7619 - DNA, 72 bp, Homo sapiens
ttggcagggagacctcacagaggcaaaactgaggacgtgcttgagggatgaggaagaggtttgaggggaaga

SEQ ID NO: 7620 - DNA, 72 bp, Homo sapiens
aagggaacagaaacaacagccaagaagacaatagccgccgggaagtcctcacatttctggagaaatagagcc

SEQ ID NO: 7621 - DNA, 72 bp, Homo sapiens
cccagaaatgttctgaggaaaggggaggcgggggccgctgggtcatccctcccacaggcccatcattgggat

SEQ ID NO: 7622 - DNA, 72 bp, Homo sapiens
cttcccggcgctgccctctgggactccgcaggcggcggctgtcacggggctggagctgtcaggtttccagcc

SEQ ID NO: 7623 - DNA, 72 bp, Homo sapiens
tccggtgtctgttgccaggcgcgggcccagtgggccgtaggggcgacattgttgccgttgtctttccccccc

SEQ ID NO: 7624 - DNA, 72 bp, Homo sapiens
tgattggttgggtcaggaataaaattatagggagtcgaagctgtcatcttatgctgagtcagtttctggagg

SEQ ID NO: 7625 - DNA, 72 bp, Homo sapiens
ggagctcaactccaggattgaagactatcgctgaccggagtgcttttcacgtactagttcatgtattacttt

SEQ ID NO: 7626 - DNA, 72 bp, Homo sapiens
ctctttcagttccacactgaaagagactagagagacgaggcaactgggttcaaaggatcctggattggatcc

SEQ ID NO: 7627 - DNA, 72 bp, Homo sapiens
tgggtttggctgcccacagctgaggccaccagccacggcttcccttattttgtgtatctttataataaaccc

SEQ ID NO: 7628 - DNA, 72 bp, Homo sapiens
gcagcaagcacttaaatggtatagctgctgctactcgggttatcaaaaaggagctgcaaaaaagtctaggtt

SEQ ID NO: 7629 - DNA, 72 bp, Homo sapiens
caccaagagctgagccagcaacaccagtgccaccccgagcagcagccaggggcctcactctcctggtgagag

SEQ ID NO: 7630 - DNA, 72 bp, Homo sapiens
tgtggaagggcagaatggcctgagtttgggtttctcgagctaccttaagatcaggcctcctggctcctatct

SEQ ID NO: 7631 - DNA, 72 bp, Homo sapiens
cagctgagagaggccgcccagctatccagcggccgcgcagccagccaagatttcaacacaggtctgccctat

SEQ ID NO: 7632 - DNA, 72 bp, Homo sapiens
attccatttcatatttcctctctctacacaaaagacgtatgtccctgcatcactctctctggtgtctctgat

SEQ ID NO: 7633 - DNA, 72 bp, Homo sapiens
ttcaagtctgctgtggctaatagtggtcaagattccgaactaggactttcctctgtgaagaggatgcctctg

SEQ ID NO: 7634 - DNA, 72 bp, Homo sapiens
aaatctagcaggaaatcagaggccgaacatgatcccggactgctgccgttgcaagattcttggaggctgcag

SEQ ID NO: 7635 - DNA, 72 bp, Homo sapiens
ggatccggtagtgtatcccagtcaagtgtcaaatgcgttgttccctggagaggaaggcttatttccagaaag

SEQ ID NO: 7636 - DNA, 72 bp, Homo sapiens
agccataaataacaaggatggtggggctgcggggccggggccgtgtggcataaagatggatcagaaggaggt

SEQ ID NO: 7637 - DNA, 72 bp, Homo sapiens
gcagtgttacatttttttaacttaaaaaacaagtacgtggtgatgtgttcaaaatatgaaaatctttgaaag

SEQ ID NO: 7638 - DNA, 72 bp, Homo sapiens
actatatcaaaagctaccacaaatgcagacaataacggctctttaatattaaagggaaaagctaacctgtcc

SEQ ID NO: 7639 - DNA, 72 bp, Homo sapiens
tgtgggcacacgtctggctggggctgcagagcacacggtgcctccctgatgctccacggtgactgtgggcag

SEQ ID NO: 7640 - DNA, 72 bp, Homo sapiens
cagtggcgacgacgacctcgctgtgttcgtggcagcggcactctcaaatctgggcacggtgatgggaaggtt

SEQ ID NO: 7641 - DNA, 72 bp, Homo sapiens
ccatctgtacacagttcctcctgcggtccccaggacgcttggtatattcaactgtcaatttatttactcatc

SEQ ID NO: 7642 - DNA, 72 bp, Homo sapiens
tgctcagcccaggatttcctcagcagcttggaggacggggaggagggtgaggctgccccccaaccaaagcca

SEQ ID NO: 7643 - DNA, 72 bp, Homo sapiens
gcacacacaggcctggccactgcctctgctccatgcggagtgtggctgggccttcctgctgtggcttgagtc

SEQ ID NO: 7644 - DNA, 72 bp, Homo sapiens
ctcagctacctgggcaccctgacagtcagagacaccgcacaggggcctctgcgacaggcatgcaggcagacc

SEQ ID NO: 7645 - DNA, 72 bp, Homo sapiens
gtaacatgcaacttagtaggaattttgatctgtttcgtgtttctctgggttgggcacagcttgacaggctta

SEQ ID NO: 7646 - DNA, 72 bp, Homo sapiens
ggaaagggacaccaaagatttccaattccggagagcgggcccgaggaagggtcactgctcgggcgcacgaaa

SEQ ID NO: 7647 - DNA, 72 bp, Homo sapiens
ttggttagggtcctgcgggtctctgaggccttgaccgtcctcggtccgtttctgtgtgttcaggcagatgaa

SEQ ID NO: 7648 - DNA, 72 bp, Homo sapiens
aaccacagacatgggcaggaggaacagagctctaccgtgtagcgtcactgccagtaagagtctgactctccc

SEQ ID NO: 7649 - DNA, 72 bp, Homo sapiens
ggcacgggtcccctccgcgccggggagcagcaacacgccttagcacatatttgccagagctctcctgccggt

SEQ ID NO: 7650 - DNA, 72 bp, Homo sapiens
ggcagacaggagtcagaggcccattccagcccaaacgagaagccagtgagcaaggtggagaccagggatgct

SEQ ID NO: 7651 - DNA, 72 bp, Homo sapiens
gacatgacctttgattgttctgattgtgccacattcgtgtggcagaagtgatgactcagggagaatgggtca

SEQ ID NO: 7652 - DNA, 72 bp, Homo sapiens
cttccgggtcccctgtagcctgagggtacccttgtcgccccgcccgggtcctgcgggccccagctctgggct

SEQ ID NO: 7653 - DNA, 72 bp, Homo sapiens
acacttttccagaattagcatttctcagataaacacgcaacccacatatcaggaaaattaccatttatcaga

SEQ ID NO: 7654 - DNA, 72 bp, Homo sapiens
aaccgaagctgactgactgctggatgtgctgggtgcgatgcgagtgtgagtgtgttttcgcactccagtggt

SEQ ID NO: 7655 - DNA, 72 bp, Homo sapiens
aatcctgcctcagcctccctaagcgctgggattatcggtgtgagccaccacacttggtcgaaaagttttctt

SEQ ID NO: 7656 - DNA, 72 bp, Homo sapiens
tagcctaggtctgggtttcaggcattgcggaggcacgtctggggagctctatgaggggaaacaagcccctga

SEQ ID NO: 7657 - DNA, 72 bp, Homo sapiens
tgctcatagaatttcttgtagttctctttatcttccgccagttcagtaaagagttctaagcattttttgacc

SEQ ID NO: 7658 - DNA, 72 bp, Homo sapiens
gttttgtatttgatgaaactgaggcagagagaggtcgagtaacttgcccaagatcacagttacaaagtgacg

SEQ ID NO: 7659 - DNA, 72 bp, Homo sapiens
ttggggtgatgaaaagttctggaaatggatggtggcggttgcatgacattatagatgtactttactcaacgc

SEQ ID NO: 7660 - DNA, 72 bp, Homo sapiens
gacgtggaagctggaggtgagagcgcagcctggggcgcggggtctggaggggcgtggccgaagaggggcagt

SEQ ID NO: 7661 - DNA, 72 bp, Homo sapiens
gttgccatcatgctctatagcagtggttctcacctcgggacgatggggccttccaggggacatttggcaata

SEQ ID NO: 7662 - DNA, 72 bp, Homo sapiens
cagccgcgcctgcgcggacgaggcagcggcttcctcgttctgggcctgaggctgtggtagcagcaacacctg

SEQ ID NO: 7663 - DNA, 72 bp, Homo sapiens
gccatgcagttgggcaagagaaccagaggtgataccgtgccctcagggacgcccccaggtcggtgcggcctg

SEQ ID NO: 7664 - DNA, 72 bp, Homo sapiens
gtagatgtcagttggttagggtaggagttggcacccgttcggaaataggagaacctgagagtgcagtcctgc

SEQ ID NO: 7665 - DNA, 72 bp, Homo sapiens
tgtgtacatatgtgtcttgctggaaaggacatattcgctgtccccgtgctgctgggagggccgcctcacagc

SEQ ID NO: 7666 - DNA, 72 bp, Homo sapiens
catgtgagcagagggaggcagttggggttgaacttcggaactaggccgggtctcctgacagatcacaagaca

SEQ ID NO: 7667 - DNA, 72 bp, Homo sapiens
gcggaaggacggtgtgcgggccggccagccctggacgaaagaagagggcccctccaggccagtctgggcacc

SEQ ID NO: 7668 - DNA, 72 bp, Homo sapiens
ctcacatacggtcctgtctgtgtgtcccgtggaagcgctacgtggatggtggcatttcagacaacctgccac

SEQ ID NO: 7669 - DNA, 72 bp, Homo sapiens
caatgcgttccccacctatgttaactcacagatctcgcctgctcactgcactcatccaaggtcttgggcaag

SEQ ID NO: 7670 - DNA, 72 bp, Homo sapiens
tttaaaaagtaatcaatttgccagagttacctaaccgggggaataaaaaggggaaaagaatctaattatatc

SEQ ID NO: 7671 - DNA, 72 bp, Homo sapiens
tctgcatactcatggtgcaaacgaggtgggaagggcggaatccctggcctagctctgcgagagtggggtttc

SEQ ID NO: 7672 - DNA, 72 bp, Homo sapiens
gggggtgggtaaaacgtgactgagaaacttgatcgcgcccatctttggggcaaagagatttggaggccgcaa

SEQ ID NO: 7673 - DNA, 72 bp, Homo sapiens
gcctcccagacagctcctgcatccgtctgtgatagcgagggcttgggggaagacacgaaggcaggagaggct

SEQ ID NO: 7674 - DNA, 72 bp, Homo sapiens
gagatccacaagctccaggtatatgggagcgagtgcgtgagagccacgtgttccaggtgtgtgcgagcaagt

SEQ ID NO: 7675 - DNA, 72 bp, Homo sapiens
ttgttttccgtctgattcagatgtgaaacttttcccgcagcctcccctctcacccagttccggtaggctggg

SEQ ID NO: 7676 - DNA, 72 bp, Homo sapiens
tcttgacagtaagccataaataatccctcttggagcgctctcctactgactggagccaattaaacattaagc

SEQ ID NO: 7677 - DNA, 72 bp, Homo sapiens
cagcctggggagaatgaatccttatgaaatcaatgcggtggcttcagtttcctgtggatggcttccagaaat

SEQ ID NO: 7678 - DNA, 72 bp, Homo sapiens
ccgggctcccatccaggccgagtgggcgcagggcacggcttctccgtggagtcccaggccctacgcctccag

SEQ ID NO: 7679 - DNA, 72 bp, Homo sapiens
tctctcccaaacttctgcttagacctaacaattgacgcaaagcttcacttatttctacactagatttacaga

SEQ ID NO: 7680 - DNA, 72 bp, Homo sapiens
gtgtccactgagccatgggcttggagcagaaggagcgagccaagtcatggaggaagggtgggggagagggga

SEQ ID NO: 7681 - DNA, 72 bp, Homo sapiens
agtccagattttctaagtgatcaaagaggaagctgcgtcagctgtgtctgcctgcccttggcccactccctg

SEQ ID NO: 7682 - DNA, 72 bp, Homo sapiens
gggatgtttcctaggtgtcagacctcgagcctcgacggccctgaagtcatagtgtttgtacaaagtggtggc

SEQ ID NO: 7683 - DNA, 72 bp, Homo sapiens
tccaggcttgaggttctttgcaaccaggggtgggccgagggactaaactggcgcggcctccccccaagccag

SEQ ID NO: 7684 - DNA, 72 bp, Homo sapiens
ttatcatagtgaaatctttatgaagttgaggtgaacgaagccctgtatgcattgttatgctatttggttttg

SEQ ID NO: 7685 - DNA, 72 bp, Homo sapiens
gagagtcacctggtgtggcctctgtggggctgtcccgccatcaccgtggccacaggccacagtgctgcaatg

SEQ ID NO: 7686 - DNA, 72 bp, Homo sapiens
actcgctgctgtgtgcgctgtgacccttctgcctccgcatttagctgtattgtgacaccctcttaaccattt

SEQ ID NO: 7687 - DNA, 72 bp, Homo sapiens
ggtgcttatttccactggctcaacaattatcccaacgcccatatggagggggcctggggcttcaagaagagg

SEQ ID NO: 7688 - DNA, 72 bp, Homo sapiens
gataagaaggggccgtaccttctgacgggtctaggcggcgggcccgcctcccgtgtttggaattgttgtgca

SEQ ID NO: 7689 - DNA, 72 bp, Homo sapiens
aatttcagtttaggccaaaatccccgcgggttggtcggggcgggagcggggctcggtgttcggggctgacgg

SEQ ID NO: 7690 - DNA, 72 bp, Homo sapiens
tgctgttagcggtggccataggggatcaaatcccccggagggaggaagtggtggggatttcagaattcctgc

SEQ ID NO: 7691 - DNA, 72 bp, Homo sapiens
gcatcattttgtaatggtgaagagggaaaagatggcgagagaccaagaagtgatgaaaaagggcctcaacag

SEQ ID NO: 7692 - DNA, 72 bp, Homo sapiens
cttcaccctgggctactctcagaataagagaagctcgagtgagctgggatagtgctgtcgtaatttcctgcc

SEQ ID NO: 7693 - DNA, 72 bp, Homo sapiens
aaaataatcacagatgataatttgtacactcttaacgtcaatgtcctgttatgcaatttctccgttaaaaaa

SEQ ID NO: 7694 - DNA, 72 bp, Homo sapiens
acccctccgagattcgtgccccactggacggtttgcgaaggctgaggctgccttggggactcacaaaagacc

SEQ ID NO: 7695 - DNA, 72 bp, Homo sapiens
ctcaacagaaatctttcacttgcagagcgagcaggcgctctggtgctgctacccagcgcggttaagcggaag

SEQ ID NO: 7696 - DNA, 72 bp, Homo sapiens
agacacttaggagttattagtgctaaaaaggggaccgtgcaaggcagcagagttacatggttcttcaaatca

SEQ ID NO: 7697 - DNA, 72 bp, Homo sapiens
gcctgcgcgctggggccttcggctgaaggggtgtgcgctagcggagctccgggaaatgaatgaatgaatgaa

SEQ ID NO: 7698 - DNA, 72 bp, Homo sapiens
ggcagcgctcgtttccggcaccgggacgagcccagcgcgctcagacaccactttcccggtgaaatctgcttt

SEQ ID NO: 7699 - DNA, 72 bp, Homo sapiens
acagcattgggcaagtcctgggcctcatgtctgtgcgaatgtccccaccctgtcaccggcacttccccccgg

SEQ ID NO: 7700 - DNA, 72 bp, Homo sapiens
ggccttctctgtacctcagagtgcagaaccacagacggcttcggctgtgcctagggcaacagccaacctagg

SEQ ID NO: 7701 - DNA, 72 bp, Homo sapiens
gaacccgaggacagagcaggtcttgggagcacgcccgggcgccccatgaataattgacccttcctggcggca

SEQ ID NO: 7702 - DNA, 72 bp, Homo sapiens
aaggccaggtgtttgtgctgaggccaaccccttcccgcccagggcacaccgggctgctccatcctgcatcct

SEQ ID NO: 7703 - DNA, 72 bp, Homo sapiens
gaagaaacagaggcacagagaagttaagcaagtcacgtaagatctcacagcccatgagtggctgaaccaggg

SEQ ID NO: 7704 - DNA, 72 bp, Homo sapiens
caacagaaaagagtagaaaaagaaattgaacttaccgcggggtgctgaaggtggaccagctgaaaaacagag

SEQ ID NO: 7705 - DNA, 72 bp, Homo sapiens
ccccaactaagaatacttctactcagaattcaagccgactgtcctagaaagtgcatcaccaataggtgaata

SEQ ID NO: 7706 - DNA, 72 bp, Homo sapiens
tggcagaggagaaaataaacgattgcgacatgttacgaagaatgaggactagcaaagaggaaggagcttagg

SEQ ID NO: 7707 - DNA, 72 bp, Homo sapiens
caccaccagctcctacaaggttcacacaatgtcaacgagaagaggaccttatagatctagtccaacttcctc

SEQ ID NO: 7708 - DNA, 72 bp, Homo sapiens
ccaaatgcatatgtctgtgcctgtgtatgtttttacggctgtgtgactgtgtgtgtgtacatatagtcaaaa

SEQ ID NO: 7709 - DNA, 72 bp, Homo sapiens
ggtagggaggggcccgcgaccgtctatccttgtggcggtgacagatcagtagagtgaattgcaggagtcagt

SEQ ID NO: 7710 - DNA, 72 bp, Homo sapiens
ccctaggcacctcagtctggagctgggtttgaactcgcaccgggtggcagtggaccccaggtgtggctaccc

SEQ ID NO: 7711 - DNA, 72 bp, Homo sapiens
ccttgggactgactggccatttctgttgttatggccgatgctgttttgaatgctgtcaaagtaccagatggc

SEQ ID NO: 7712 - DNA, 72 bp, Homo sapiens
ccttgtcactgcatgtgaagatagaccagacgccccgcagagacagccctcttgaaactctcacctaaagga

SEQ ID NO: 7713 - DNA, 72 bp, Homo sapiens
ggaagactgaagtccctggggcgggtaggagcgcacgctaggagtagtatgaataaagtgttttcttggagg

SEQ ID NO: 7714 - DNA, 72 bp, Homo sapiens
tcagcctactgccagtgggggtggttacagtgactcggcagtaaaaatacatgtttttcccttccattcagg

SEQ ID NO: 7715 - DNA, 72 bp, Homo sapiens
ccgcattcgtcaggagcccggggcgaggggactcacgtgccctccgtcattgctgctgcagtgctctacgcc

SEQ ID NO: 7716 - DNA, 72 bp, Homo sapiens
aagcagctgccttactatccttccagcccagagcacgtgagctgacgtcttctttggcctgtgtggccgttt

SEQ ID NO: 7717 - DNA, 72 bp, Homo sapiens
gaagcacagcatgtaatgtaataccagatgttctacgtgggaggaatttcataactcatacattttagcatg

SEQ ID NO: 7718 - DNA, 72 bp, Homo sapiens
aaccagccgtgttttctggcattttgaccagccctcggaaactgctgacatcatgatgtactccttgcctgg

SEQ ID NO: 7719 - DNA, 72 bp, Homo sapiens
gaggaggccctcgctgtgccaagtcattttcctgccgcaccctaccctgagcatcaccggcacccactcgcc

SEQ ID NO: 7720 - DNA, 72 bp, Homo sapiens
cctcctcctccacccctcagcctggcatattttggcgagggacttccctgatgccaccgggcaaggtatctt

SEQ ID NO: 7721 - DNA, 72 bp, Homo sapiens
acactgcccttgggctgtgtggtttctctctgttccgagccctgttcctccaccttagcggaatagcgcctc

SEQ ID NO: 7722 - DNA, 72 bp, Homo sapiens
ggttctcattgctaactaatagacgggtctggatgcgcagagtccttgaggatagtaatagtgtcaggattg

SEQ ID NO: 7723 - DNA, 72 bp, Homo sapiens
tcagttgctgaatcctagtgatctgctgttcaagtcgcctcaacctgttcccttttcttcattccccagctc

SEQ ID NO: 7724 - DNA, 72 bp, Homo sapiens
tcatgcagcacacgaccttcagggactgggctcttcgctccgctaaactccctggagatctattcaagtatg

SEQ ID NO: 7725 - DNA, 72 bp, Homo sapiens
gagcctgtaagaaaattttgaagagtctcttgactcgggggtagaaaggcagggttagttgcaaaaagcaag

SEQ ID NO: 7726 - DNA, 72 bp, Homo sapiens
ctctcctgccccatctccttgggctgcccgtgcttcgtgctttggactaccgcccagcagtgtcctgccctc

SEQ ID NO: 7727 - DNA, 72 bp, Homo sapiens
ccaggatgcagcagtgtcatctgaacccctggcttcgttcagtgctacttcacttgccagccctccactctt

SEQ ID NO: 7728 - DNA, 72 bp, Homo sapiens
gctctctggagacggactggctgtggacagcgagtcgtgatgaaattcctccttggccgtggtcgggctgat

SEQ ID NO: 7729 - DNA, 72 bp, Homo sapiens
acatcaaggaagtggattcctgcaaacctggcacccgagggtccacttcctcaatttctgtgcagctgggag

SEQ ID NO: 7730 - DNA, 72 bp, Homo sapiens
ttaatttatacttcctctcagagctgactcatttccgttattctctgggactcccttctaaaatgtttccat

SEQ ID NO: 7731 - DNA, 72 bp, Homo sapiens
ctaaggagacccctattatcctatgctggggagagcgtaggggcaccgggactggtcccgcagtcccgcctc

SEQ ID NO: 7732 - DNA, 72 bp, Homo sapiens
ggaggctttgcggacccggcgcggggccttcagggcgcaggcgactcagcgttgaatgcgtgaaaactgagc

SEQ ID NO: 7733 - DNA, 72 bp, Homo sapiens
acccaagaagagtaagcaaactaccgtccacccagcggatcaggtccaatccctgcgcctcggcccaatccc

SEQ ID NO: 7734 - DNA, 72 bp, Homo sapiens
ccccacacatagcaggccagcatcacaggctccctcgtgttaaaaggagtggttttggctacttgcacagat

SEQ ID NO: 7735 - DNA, 72 bp, Homo sapiens
ttgtgctgcctgtgggcccccaaggggaacagatccggaaccctcctcccccaatctccttaccacccagca

SEQ ID NO: 7736 - DNA, 72 bp, Homo sapiens
ggctacctcagtttccccattttggccagactcaccggcccactggggtggtgatgttttcgttctgtttta

SEQ ID NO: 7737 - DNA, 72 bp, Homo sapiens
ctcggcgtttcagaatccggctggcccgagtgaggcggtccaaagtgatccctggagggggcagtgccagac

SEQ ID NO: 7738 - DNA, 72 bp, Homo sapiens
tctgtggtcccattgtctccacgtctgtggtaacccggtgcctttctagagcaggcaggctcccggcatggg

SEQ ID NO: 7739 - DNA, 72 bp, Homo sapiens
aattcacaggcagaaggaagagtcagagagaggggcggccccaaggcttcactttatgtaggcattgaaggg

SEQ ID NO: 7740 - DNA, 72 bp, Homo sapiens
cagggccaagttggacctgtgcttacaatgactcacgggccttttccccacctgtctacccaacagccaacc

SEQ ID NO: 7741 - DNA, 72 bp, Homo sapiens
ctcccccacagccccaggagatgcagaccaaggcacgcaagctctgcctgaggtgtcggaagccaggtccat

SEQ ID NO: 7742 - DNA, 72 bp, Homo sapiens
tatttccaggaaggagtattgtttgacaaataattcgtacttggatttttcagaacagttcagtcactgtct

SEQ ID NO: 7743 - DNA, 72 bp, Homo sapiens
catcctcgtaactctcgtcaccatattctatctaacgcctgcagctcctggtctcaggaacttcagttctcg

SEQ ID NO: 7744 - DNA, 72 bp, Homo sapiens
gatgggagggacagatcacatttgtcttgaaaaaccgtcattctaacaaaagtgcatgtctgttcctgtcag

SEQ ID NO: 7745 - DNA, 72 bp, Homo sapiens
atgcaaaataaacagaacacatggtttcaattacccgccaaataactttaaattgtttaaattatgtgagta

SEQ ID NO: 7746 - DNA, 72 bp, Homo sapiens
tgcaatcactacctcgatctacttccagactatttcgtcaccccgtaaagacgctccgttcccatcagcggt

SEQ ID NO: 7747 - DNA, 72 bp, Homo sapiens
gatgactgagcagttctacaaaagaatggccagcacgagcggggactagagggtcctgattttgtgtctgtg

SEQ ID NO: 7748 - DNA, 72 bp, Homo sapiens
ggccaggaaggccggggtagcccctcagtcttccccgccactggcgcgtctccctgctccaccatcctaacc

SEQ ID NO: 7749 - DNA, 72 bp, Homo sapiens
tcttatattcctcctattttatcttcctggttccccgaaagaagcatgttgtgaagtatttgtgtcatacac

SEQ ID NO: 7750 - DNA, 72 bp, Homo sapiens
ccttgcaggcctttctttagctgctaaaaggctgtcggtctttgctgatttgcagaaaggtgcacgctcatg

SEQ ID NO: 7751 - DNA, 72 bp, Homo sapiens
ctcccttcttttccctccttccttcctgtaggcctcgactacacaccacactgccagggaacccaacaagtg

SEQ ID NO: 7752 - DNA, 72 bp, Homo sapiens
cggctgtgagagtgaagaaatcctcttccaaccgacgatgttcctcagtgaaaaaggaaggaagggcattcc

SEQ ID NO: 7753 - DNA, 72 bp, Homo sapiens
ggtggcctgttccaggtgccagatcctggaggtcccgccttaggggctgtgcctggacgtggggctgccccg

SEQ ID NO: 7754 - DNA, 72 bp, Homo sapiens
ctcccgccgctccgggcctcccgagccaagacaagcgcaggttgggacttgcacgggaaagctcacctgaga

SEQ ID NO: 7755 - DNA, 72 bp, Homo sapiens
ggtcagcgtacttccccacgtacccaggagctagacggaaagaagtaaggagccactggtgtggctttgtgc

SEQ ID NO: 7756 - DNA, 72 bp, Homo sapiens
cgcagggagtgggaaaccggcctgtcccagacagccgggaaggaaagcggggtgcgagttctggctccagtc

SEQ ID NO: 7757 - DNA, 72 bp, Homo sapiens
cttctggcagctgctgtcaatccttggcttgaaaccgcagctccaatgtctgccacagccccatggccttct

SEQ ID NO: 7758 - DNA, 72 bp, Homo sapiens
aatcacataaatcactgggggtggggcctgggtatcgagtaattctaatatgagctaggggtaaaagccatt

SEQ ID NO: 7759 - DNA, 72 bp, Homo sapiens
gtgcacgctgaaacatccagctgggtccacgcagccgcggctgcccgcgaaccgcgtgttcatctgcgtgct

SEQ ID NO: 7760 - DNA, 72 bp, Homo sapiens
cgtggcttcgccagtgactcagaacaaaccagggtcgcgggttccttcctcgccagtcaaacgctgagggct

SEQ ID NO: 7761 - DNA, 72 bp, Homo sapiens
gccatgggggtgcaagcagatagcctgccttgtgacgaaccacacaacctcaggttgcacactgggaagggg

SEQ ID NO: 7762 - DNA, 72 bp, Homo sapiens
cagtctacacagctgtagtccccaagtgttgggcacgccttaagcgctccataaacacctgtagaaatgaat

SEQ ID NO: 7763 - DNA, 72 bp, Homo sapiens
caccctacctccgagtgcctgtgactttgtatcaccgctctggcaccacatcctcatcccagcaggatttgg

SEQ ID NO: 7764 - DNA, 72 bp, Homo sapiens
taaatctactgctggaatggggattctttctaaaccgtgttgttccctctcttcaaacagctggagctgtac

SEQ ID NO: 7765 - DNA, 72 bp, Homo sapiens
cgatgggcactaacataatatttccttttctccaccgtctttaccccttttccttcagctcccctaaacctt

SEQ ID NO: 7766 - DNA, 72 bp, Homo sapiens
ttgaggattactgtgttttgtgagagctcgctaggcgccctaagcaacagaggtaaccactttatatccttg

SEQ ID NO: 7767 - DNA, 72 bp, Homo sapiens
taacggaggccagtgcgtcaaaaggacttggctcccgccccaggctgtcatcaggccagagatggccatgtc

SEQ ID NO: 7768 - DNA, 72 bp, Homo sapiens
aaaaaaccaagagttctcaagttaagctaccttcacgaacctcttattaaatttaagtatcactctctgtcc

SEQ ID NO: 7769 - DNA, 72 bp, Homo sapiens
tggcccggggcaccggaggacctgggcagggctggcgtgtgggccgagcagcccggcaagttaatcagggct

SEQ ID NO: 7770 - DNA, 72 bp, Homo sapiens
accattccacgtggttcagctggccagctgcctgccgggacctggatgcggactgttcccaggtaggcaaca

SEQ ID NO: 7771 - DNA, 72 bp, Homo sapiens
aggcagaggcaggatgatggcttgagcccaggaaccggaggctgaaatgagctatgatcgtgccactgcact

SEQ ID NO: 7772 - DNA, 72 bp, Homo sapiens
gccgcctaccctggtctggagcccctgcgagctggcgtagagcaggaaggggttgcatcacagctgagtcct

SEQ ID NO: 7773 - DNA, 72 bp, Homo sapiens
acaggcttgggccaacagaaccagcctccgtgtctcgggtttgaatgaacccttgaggtgaagcttaaagac

SEQ ID NO: 7774 - DNA, 72 bp, Homo sapiens
agggcagagtgtggaaagtttcttaggggagatgacgggacgttcaggaatggtctctggggtttactgagt

SEQ ID NO: 7775 - DNA, 72 bp, Homo sapiens
cctataaactataaacttttcagtaagagttaccacgagatagcctaccatcttacatttcaaaaaaacact

SEQ ID NO: 7776 - DNA, 72 bp, Homo sapiens
gcgaggggatttcctgccaggcgaagtacagagagcggactctggagaccccctgaccttgcccgatagtcg

SEQ ID NO: 7777 - DNA, 72 bp, Homo sapiens
cttctagtgggggaggtggccgagggagggagcgacggctgtcaatcacaggccacgccctcctcagcccaa

SEQ ID NO: 7778 - DNA, 72 bp, Homo sapiens
acaccttccccagcccccacaccgcctggccgctacgcccccatccctgagccaccgcagggcagagctgga

SEQ ID NO: 7779 - DNA, 72 bp, Homo sapiens
tggctttttcagagataggaaggagggtggccctacgtacatttcatatttgtagggcaattgcgtcacaac

SEQ ID NO: 7780 - DNA, 72 bp, Homo sapiens
cttgcttcattcaaacatgtgcagcttcaagtgggcgtctactgcattagattagataagtcacaagggcag

SEQ ID NO: 7781 - DNA, 72 bp, Homo sapiens
cctcagtgagcactgatgtgtgaaaatgagttagacgctcagaagtcactgctggtttcagaaaaaaaagtc

SEQ ID NO: 7782 - DNA, 72 bp, Homo sapiens
gttccaccggggccttgcctgtaaaatgctggagacgtttacccggaggccacagcagactgggaacatagc

SEQ ID NO: 7783 - DNA, 72 bp, Homo sapiens
caggacccagagcccccactgaggaagaggagtcccgcccatcccttcggagcctgggttgcggtcccagct

SEQ ID NO: 7784 - DNA, 72 bp, Homo sapiens
ggactttctgccagcctgccctctttagcgctggtcgggctctgtggtggatatgtcgaaagttaggggaac

SEQ ID NO: 7785 - DNA, 72 bp, Homo sapiens
agacgcaggcgggaactggggctgcgcgcagcgttcgcgggccagcgtgagttccgggtgggcgtggggctc

SEQ ID NO: 7786 - DNA, 72 bp, Homo sapiens
cccagctgcagacaccccagcccaggaaaactgctcgcggctgagtcgctgagcctctcaaaccgcctgctt

SEQ ID NO: 7787 - DNA, 72 bp, Homo sapiens
caggggcactaggctccccacccagcagagggctgcggcccatgggagacaggaggagacccggatgaggaa

SEQ ID NO: 7788 - DNA, 72 bp, Homo sapiens
acatctgcgccggggcctccctcagggaggagactcgagctggaaccaggctgtgaccctgcaccctgctgc

SEQ ID NO: 7789 - DNA, 72 bp, Homo sapiens
gggcctcagcagggtgacaggtctgttcacagtctcggtcttgattgtggtgaaggcttcacaggctcacac

SEQ ID NO: 7790 - DNA, 72 bp, Homo sapiens
cccctgggccccacacaggcttgggaggagcccttcgtggggctgcgccgccctccccgaaccctctgtccc

SEQ ID NO: 7791 - DNA, 72 bp, Homo sapiens
atcaatcttccttaatttgtaactgggcagtgtcccgggccagccaatagctaagactgccccccccgcacc

SEQ ID NO: 7792 - DNA, 72 bp, Homo sapiens
gagccgtctgcccctttcgcccctggttccccccacggcagcccctgatgtgtctctgctccaccaggtgac

SEQ ID NO: 7793 - DNA, 72 bp, Homo sapiens
tcacgttttcgtaaaatttactgcgaaagtcttaccgtcttgcagcttccttgcaaaactgtaacttcccca

SEQ ID NO: 7794 - DNA, 72 bp, Homo sapiens
ttcctgactgggacatccttggttatttcattaggcgtggtccccttcctcctcgagcagcctggagcatct

SEQ ID NO: 7795 - DNA, 72 bp, Homo sapiens
aggcaaccacaaagacctcctagtttattaatgtccgtgggagaacaaaatgattggaatggaaaagagaaa

SEQ ID NO: 7796 - DNA, 72 bp, Homo sapiens
tttagcttttcctcttgtaaatttcagagccagctcgaaggttattgaggacacttatccgaaagaggcaaa

SEQ ID NO: 7797 - DNA, 72 bp, Homo sapiens
agctgggtgaatagtcacggaatctcactcacgctcggctcctccacccatcccgtctacagcgcgtgtccc

SEQ ID NO: 7798 - DNA, 72 bp, Homo sapiens
cccaggtctagcaagaatgtctcctctctcccaagcgtgcctggagagtgtccttccacccagagtaaactc

SEQ ID NO: 7799 - DNA, 72 bp, Homo sapiens
tccactggagacagcgggacgtccagctcccctctcggtgagtgagtgacgctgtctcggctcactcggtta

SEQ ID NO: 7800 - DNA, 72 bp, Homo sapiens
ctgcagcggccttggcatcctcttcagcagggtggcggccggaactggcaccttccccccggtctctttatt

SEQ ID NO: 7801 - DNA, 72 bp, Homo sapiens
tggtagtggttgcacaatattgttaaagtactacacgtcactgctataaacacttttaaatgggtgaaatgg

SEQ ID NO: 7802 - DNA, 72 bp, Homo sapiens
gctctgggtgaacaccagttatcctcctacaaaggcgtgtctgtggttccctgtctttggacacgtaagaat

SEQ ID NO: 7803 - DNA, 72 bp, Homo sapiens
gacattcaggcagagggtgcctacaagaatttatacgagtcagacattcatgtcactagttgcagacccagg

SEQ ID NO: 7804 - DNA, 72 bp, Homo sapiens
tgggtacataccacccttcctcagattttccagtacgtcagttgaccttacacaagtggaatcttgctgcaa

SEQ ID NO: 7805 - DNA, 72 bp, Homo sapiens
tttgcctctcaatctgggcagctctggctggggaccggcagtaaccggagatctagtcagtcagccagtagg

SEQ ID NO: 7806 - DNA, 72 bp, Homo sapiens
ttcctgaagtgaaggaaattattgaaggatgcatacgacaaaacaaagatgaaaggtaagttgcctcttttg

SEQ ID NO: 7807 - DNA, 72 bp, Homo sapiens
tgtcactccctgctccataccctcctgtagcccaccgctgccccttggggaacctgtcccccatgtctcctg

SEQ ID NO: 7808 - DNA, 72 bp, Homo sapiens
gcttgtcttcctctttatttttactgtgtgtgtctcgggttgctattttctgttttgtgtatgaaaagacct

SEQ ID NO: 7809 - DNA, 72 bp, Homo sapiens
atttccccattgtttggaaactgtgatgtggaagtcgtggggaatcatattctctctgttccactttgggga

SEQ ID NO: 7810 - DNA, 72 bp, Homo sapiens
ctgagactagccttgctggccccggcggagctgagcgccctggaagagcagaaccggcaggaaccactcatc

SEQ ID NO: 7811 - DNA, 72 bp, Homo sapiens
gaaagtcattgtgagcctcatctgctcaggcacagcgggtggcagtagggaatttagcaacagatgaggaca

SEQ ID NO: 7812 - DNA, 72 bp, Homo sapiens
ctggggctcggcttcatttcgccttaaacagggaccgtggactcctcagggcgggccgcggcaggtgatggc

SEQ ID NO: 7813 - DNA, 72 bp, Homo sapiens
gtcagccaactcatttggctcttaaacctaagtcacgttctacaatataggttttatcaaaaacaaaggcaa

SEQ ID NO: 7814 - DNA, 72 bp, Homo sapiens
ttgagtgagaacccacaaaagaaatgccacagaaacgataatctgtccatgacaagattaagtaacaacaat

SEQ ID NO: 7815 - DNA, 72 bp, Homo sapiens
gctttaaaaccctgtgctttgctgtaatgttaggccgctgtagtagtttaccactgtgggctgagggaatac

SEQ ID NO: 7816 - DNA, 72 bp, Homo sapiens
gctggaaaccagaggcagatgcgcagggcttcagacgttcctcactcgaagtacagtcttgttaaatggggc

SEQ ID NO: 7817 - DNA, 72 bp, Homo sapiens
ttcagatatgtccacattatctcctatgatctttgcggtgacatcctttgggcacatgaaaaccttactttt

SEQ ID NO: 7818 - DNA, 72 bp, Homo sapiens
gcaacattgcatatttggagatgacctcatccagccgactcatggccaaactccggttttcccgaaggcgcc

SEQ ID NO: 7819 - DNA, 72 bp, Homo sapiens
cagaaagccgaggctgcacagcctggggagtggagcgggcaggcgtctcacgccccggacctccccctgccc

SEQ ID NO: 7820 - DNA, 72 bp, Homo sapiens
tgtgtggagcccagtcagcactcaacatgaggtcccgtgggggctgcctgagggcgtagcttccagaattca

SEQ ID NO: 7821 - DNA, 72 bp, Homo sapiens
gttacctgttctttctcgccatgatccggagagcacgccacatcctcctccaaccccttcaccctcactggc

SEQ ID NO: 7822 - DNA, 72 bp, Homo sapiens
tattagcacatcactggacttgagcagatatcagtcgggttcagttgccttcagaactcctgttagaatcct

SEQ ID NO: 7823 - DNA, 72 bp, Homo sapiens
ccgaggggctcgggcaggagccagacaggctagagcgggctgcaagttccggggcccggctggaagcctgat

SEQ ID NO: 7824 - DNA, 72 bp, Homo sapiens
ctggccggtttccccaccgcactggtccgccggtccggattttagaagtttggggccgcacgtttttcagtt

SEQ ID NO: 7825 - DNA, 72 bp, Homo sapiens
gcctgcaggaagaactgctggcggtgggccagcctcgctgcgcatgcccacccagaacgccaggcagacaaa

SEQ ID NO: 7826 - DNA, 72 bp, Homo sapiens
tagttcatcattatcatcatcatcatagtcattctcgttattgaggaatggccttggccttgtgccaagaaa

SEQ ID NO: 7827 - DNA, 72 bp, Homo sapiens
gtgtcctgccttcagaaaccggccgtgagtgagcccgctggcattttgggaggccaatatataggccctttt

SEQ ID NO: 7828 - DNA, 72 bp, Homo sapiens
cgccagcctggcagccagcatcaagggtgtggtcccgtcctctgtgcgagcgtccactgcagtttgtctgct

SEQ ID NO: 7829 - DNA, 72 bp, Homo sapiens
ctgagccttcttaaagtggtaccccaggccgggcgcggtggctcacgcctgtaatcccagcactttgggaag

SEQ ID NO: 7830 - DNA, 72 bp, Homo sapiens
agaaatgggaaatactgactctagcattcaaaccccggtttgtcttgttcaaaatctacaggcttaccacta

SEQ ID NO: 7831 - DNA, 72 bp, Homo sapiens
gaaccaggactgcgcgcagcactcatgggccagcacgagttccgggtgggtgtgggcttgatgggccccgca

SEQ ID NO: 7832 - DNA, 72 bp, Homo sapiens
accatgattgctctggggaggggcacccaaccagccgggcagggtaatggcagccaagtcctccacttgctt

SEQ ID NO: 7833 - DNA, 72 bp, Homo sapiens
ttttttttttttaacgctgatatattttgaatttacgaatgtgaaagctgaacttcaaaaaataaagggaga

SEQ ID NO: 7834 - DNA, 72 bp, Homo sapiens
acatctcattccctgacgctcctgagtcccacagacgcccatcaggccggtctgaggaggggcaagtgcatc

SEQ ID NO: 7835 - DNA, 72 bp, Homo sapiens
cggaaatccctgcccccaacaacttcctacctaaacggtagctccatggcttctggcaacttttgttttgtt

SEQ ID NO: 7836 - DNA, 72 bp, Homo sapiens
cacacccgtgtcttaaatctggcagccatgcttgtcgcttttaagtggcccacagttgcccagtgttttcct

SEQ ID NO: 7837 - DNA, 72 bp, Homo sapiens
gatggcaaaaatggtctcctcttccgcggagaaagcgtcctccgcggcgggcccggcgccctgcgtggagtg

SEQ ID NO: 7838 - DNA, 72 bp, Homo sapiens
tccccgtctcggatcccacctcatttctccgctgtcgacgtgggctgggggtcgctttgaaagacacttcct

SEQ ID NO: 7839 - DNA, 72 bp, Homo sapiens
gcctggagtgatgcctccacctcaattctggggcacggcgggttcctccagccccccaccagggcagcagct

SEQ ID NO: 7840 - DNA, 72 bp, Homo sapiens
ggcctgagaagggtgacggggctgtcagagaagggcgaccacagagaggaagagaaagaggaggagcagggt

SEQ ID NO: 7841 - DNA, 72 bp, Homo sapiens
gtgggggctccagcccttgcgcccctccccgcaagcggatcagggcgaggcagccccaggcttacaggtggg

SEQ ID NO: 7842 - DNA, 72 bp, Homo sapiens
ctggtttctgcaaagttgatgatgaaatttcctaacgtcttctcagaaagcttaacactggatttagacttg

SEQ ID NO: 7843 - DNA, 72 bp, Homo sapiens
gggtctagctctgtcaccactaggtgccaacacagcgacctcccaggctcaagcgatcccatccgcctgcct

SEQ ID NO: 7844 - DNA, 72 bp, Homo sapiens
cccggccaggatgcggccaggaggcagagggaggccgcaccatccctgctcggccaagcccaggggaacttg

SEQ ID NO: 7845 - DNA, 72 bp, Homo sapiens
cccaatgtaaaacctgatttgatttcatcactaagcgaattacaacagcataagcatgttcttactacataa

SEQ ID NO: 7846 - DNA, 72 bp, Homo sapiens
ggtgagctgcagagggtgaataaaccacaaccctgcgctgatgccacaagtgacaatgaacacacacacata

SEQ ID NO: 7847 - DNA, 72 bp, Homo sapiens
ttgagaagtagttgggatcatggaggccaacccaccggctccttggcattacttcatttggtgtttttcacc

SEQ ID NO: 7848 - DNA, 72 bp, Homo sapiens
gtagctgaatgacctttggcaaccaattacttaaccgccctctctagacaacaattttctcaactacaaaac

SEQ ID NO: 7849 - DNA, 72 bp, Homo sapiens
ttctttcagatttccctctttcctcctttcctaatcgttcataatgctctaataaagagagggtacagacac

SEQ ID NO: 7850 - DNA, 72 bp, Homo sapiens
gtccctggggggctgaggtttctcagctgagaggccgacgctcagagaggctgggtgtctgctgagggtcac

SEQ ID NO: 7851 - DNA, 72 bp, Homo sapiens
tcaccccccggggggacgcaggtcagccggtcagtcgtgcgtggcctggctggcctcctgcccggctgcctg

SEQ ID NO: 7852 - DNA, 72 bp, Homo sapiens
gagccataagattgttggatgtcaaagctcagaaccggtcaaggctcagaatgctccttaaacctggagcaa

SEQ ID NO: 7853 - DNA, 72 bp, Homo sapiens
cccagcagggggtgtcctggctccagccttgtgtccgggtccccacctcacccctgtgtcacaatgggcgag

SEQ ID NO: 7854 - DNA, 72 bp, Homo sapiens
ggaggaaaggaagcaaactttacccaactcttcagcggcccagctgggtgtctgcgatgtccacatatggct

SEQ ID NO: 7855 - DNA, 72 bp, Homo sapiens
actcgggtactcccaccactcggagtacccgagcccggcaagaggagctctcacttctagctctgcactgag

SEQ ID NO: 7856 - DNA, 72 bp, Homo sapiens
acacccagcatgaataccatggtccttttctgacccgccaggaggaatactctacctacccaaacagcttca

SEQ ID NO: 7857 - DNA, 72 bp, Homo sapiens
tcacaccgagaggctccacgcatgtgaattagccacgccagacactgggagccccccaatctcccttcagag

SEQ ID NO: 7858 - DNA, 72 bp, Homo sapiens
ggggtcctgagagaacaggcccctcccccttttcacgacagtgtgtgcatatgcacactcacttctgtatcc

SEQ ID NO: 7859 - DNA, 72 bp, Homo sapiens
ggtagtgcttttgtgtacttgtctggttgggacttcgtgtttctttcttgggattgttgtctgggactgcaa

SEQ ID NO: 7860 - DNA, 72 bp, Homo sapiens
gggcagaggcgggtgaaaaccaatgctcgtccagccgggaacagaacaggatgtacctcgagacttgcttcc

SEQ ID NO: 7861 - DNA, 72 bp, Homo sapiens
ttgcataatggagtctaagatcccagggagagccccgatctgcccctgagcaagggaagtacattccctcat

SEQ ID NO: 7862 - DNA, 72 bp, Homo sapiens
ttcagtcggcaggccagcagacaagtggaggtgggcggggaatccaggcaggagtggcctggcatttcctgg

SEQ ID NO: 7863 - DNA, 72 bp, Homo sapiens
cacctaacgatgcatttcctggacgggatcccagtcgttaagcaatgcgtgactatgcatcgcgatgcatga

SEQ ID NO: 7864 - DNA, 72 bp, Homo sapiens
tgcctgcctgcctaccggtctgccttttggtccgccgcttggtggggccccaggtgtaacctctggctgtct

SEQ ID NO: 7865 - DNA, 72 bp, Homo sapiens
ggggaggccgcctctgagcgggacgccgggactcccgccgctgctaaatatatccgtaggaatggagaggga

SEQ ID NO: 7866 - DNA, 72 bp, Homo sapiens
tgttgtcagcatgtttgccgctttgatttagaggccgggataaagggcgattatcaaaggactgcatgttcc

SEQ ID NO: 7867 - DNA, 72 bp, Homo sapiens
agctgggtgagtatggcagtggctctgccagccaccggacttaacttcttgcccctaccccagccagcccag

SEQ ID NO: 7868 - DNA, 72 bp, Homo sapiens
tgcatttgagctgtcctagaagggcttccagagctcgagctgttgccaagtttagaagtggccgcatgtgtg

SEQ ID NO: 7869 - DNA, 72 bp, Homo sapiens
ctgccttttgggtcaaacttctgaagttgtgcaaacgtatggacaaattaccatgagctgacaggggcagcc

SEQ ID NO: 7870 - DNA, 72 bp, Homo sapiens
acctgcacgtgtttaataaaaggaagtggctattccggtttctttttgatgggcaagcattttgcaaggcct

SEQ ID NO: 7871 - DNA, 72 bp, Homo sapiens
tttaccatgcctttggaatgtcatgggcaacagtccggtgaaatcttttcccaattaggtagctgccacctt

SEQ ID NO: 7872 - DNA, 72 bp, Homo sapiens
ccggcgggtttcactgccgcccaagggaggggtcccggaggtgggggagcatcctggggaccccaagcccat

SEQ ID NO: 7873 - DNA, 72 bp, Homo sapiens
tgatggaggaagggcacagagggaaaagagagggccgtccactctggacatgatcagtgtgtgtggaggttg

SEQ ID NO: 7874 - DNA, 72 bp, Homo sapiens
cacatcagaaattctgcaacattcataaacacagacggtgtcagcagacttgatacagcataaatagaacaa

SEQ ID NO: 7875 - DNA, 72 bp, Homo sapiens
cttgcacctgggctggggcaggatcctgaacctctcgggggcgtagcccgcggaacgtggtcggcttgttgg

SEQ ID NO: 7876 - DNA, 72 bp, Homo sapiens
cgaagtctggtcccatgtaccctgggattctgccacggaagatgactcacttaattaacacgctgctcctga

SEQ ID NO: 7877 - DNA, 72 bp, Homo sapiens
gtccgcctccattgaattggctcgattacccgcaacgcacaaataccggggtcgggagacctggattcgagt

SEQ ID NO: 7878 - DNA, 72 bp, Homo sapiens
tgcttaaggaacacatcagctcatgtggccaaatacgagggttgaaaaataatgacaggactctcatttcag

SEQ ID NO: 7879 - DNA, 72 bp, Homo sapiens
aggtcataggagaggagcatgatggactctagagccgaggtgatggaagccttgaaggttttgctgcagaaa

SEQ ID NO: 7880 - DNA, 72 bp, Homo sapiens
cagctggtggatggggtgatgccttggatatttatcgtgtgtttcttgcctggcctgcccttggacagtgcg

SEQ ID NO: 7881 - DNA, 72 bp, Homo sapiens
catttcagcagcacacggagtcagtttagggttggcggcaaaagaagaaggaaatgcctgatagtccagtgt

SEQ ID NO: 7882 - DNA, 72 bp, Homo sapiens
gtttagctccaccctgcctgccagccccagagctccgctggcatcaggccagagtactcaggcctctggggc

SEQ ID NO: 7883 - DNA, 72 bp, Homo sapiens
tcagagcagcctccagggggagccctcagccataccgtgccctggtccgagaggctcggccaagggagtctg

SEQ ID NO: 7884 - DNA, 72 bp, Homo sapiens
gggaaagggaaccccttagtcggccgggcattttacggagcctgcactttcaaggacagccacagcgtgtac

SEQ ID NO: 7885 - DNA, 72 bp, Homo sapiens
ttagatgctaaatacccaaataaaaataatacatacgtcctgttctgcagacgcgtataagtcacagaagga

SEQ ID NO: 7886 - DNA, 72 bp, Homo sapiens
agggacttagagcagggtcccttccctgagggcctcgcccccgaggacgtggcgccggagccgtgcgaccca

SEQ ID NO: 7887 - DNA, 72 bp, Homo sapiens
ctggtgttggctggcagcatctgcattctaagcagcggggaaagctttcgagttccttgaccttcatcttga

SEQ ID NO: 7888 - DNA, 72 bp, Homo sapiens
ttgtcattcaataatgttaggttaattaaaatgtacgtgcagacagaatttgagtttaaaaactatactact

SEQ ID NO: 7889 - DNA, 72 bp, Homo sapiens
atgggcttcagggcgctgtcagaacttccaggcggcggggactattaacggtcacatggaggccgccgcatc

SEQ ID NO: 7890 - DNA, 72 bp, Homo sapiens
ggtggccaggctggtttcaaactcctgacctcaagcgatccgccccgcttggcctcccaacgttctaggatt

SEQ ID NO: 7891 - DNA, 72 bp, Homo sapiens
gagtggaaattgagcaacaccaactgagtgaaatacggaaatgataccaaatggcaccgaagcagcagagca

SEQ ID NO: 7892 - DNA, 72 bp, Homo sapiens
tgggtggtctttgtctgcagttgaacagtttaatccgttccttgtatacaagaaactgtgagctgaaacatt

SEQ ID NO: 7893 - DNA, 72 bp, Homo sapiens
gccccccaccactgtaccctcccttttgtgttggccgagatagatttcatcaggaaccctagagtctgtctt

SEQ ID NO: 7894 - DNA, 72 bp, Homo sapiens
cgtgccggggaagttgtggacgtccagccagaggacgctggcgggcgggtggatggacaggacggacggcca

SEQ ID NO: 7895 - DNA, 72 bp, Homo sapiens
tggaaacccacactcgggcctgtgttgagcaaccacgtttgagtaagagttatcttatttggcagggtgggt

SEQ ID NO: 7896 - DNA, 72 bp, Homo sapiens
ggacacctgaggtttcctgccacaaccctgctgaccgttggcaactttgcagaacttcagggctgctttggc

SEQ ID NO: 7897 - DNA, 72 bp, Homo sapiens
atgggatgggccactttctaaaagtccctacccctcggggaatgaggaacagagctgaagtaggctagagta

SEQ ID NO: 7898 - DNA, 72 bp, Homo sapiens
gtagctttgactttttctttgtacttcttggagcacgtaaatctgttacaatgaacatgtcatttttatagt

SEQ ID NO: 7899 - DNA, 72 bp, Homo sapiens
agggatccaagaattagcagtgtcctgtgtggtctcgctgagggaagccaggcaaaatctagcggctcagct

SEQ ID NO: 7900 - DNA, 72 bp, Homo sapiens
caccctagctcatctctggctcactccctgtcccccgtctcccccggggctcccacagacatgatgcaacca

SEQ ID NO: 7901 - DNA, 72 bp, Homo sapiens
gctcagcccccgcggggactggcttgggagaggcccgctccccacacatggcgggcgggggcgccaggcctc

SEQ ID NO: 7902 - DNA, 72 bp, Homo sapiens
tctaggcctcttgctccccttccttggttccttctcggggtccctgtcctccacagctgtctctcagggtct

SEQ ID NO: 7903 - DNA, 72 bp, Homo sapiens
caatcaaaacaaataataccaattatcagactgcacggtggggaaaagcaggtcaggtgggaaagtaagcac

SEQ ID NO: 7904 - DNA, 72 bp, Homo sapiens
aaattcagccattcaacagagacattaccaaatgtcgatcataacagcatccaccctgaatgagtctactct

SEQ ID NO: 7905 - DNA, 72 bp, Homo sapiens
ggctgattgcagagcttagagctactggtactggtcgaggaagagttgcaggaaggagacaggcagttcagg

SEQ ID NO: 7906 - DNA, 72 bp, Homo sapiens
attgttctcttccgggaagggagggagccgaggtgcgagacaagcttttaacaaggtttaaaatttgagaaa

SEQ ID NO: 7907 - DNA, 72 bp, Homo sapiens
cttctgtggtgtgtgtctattcatcagcctcttgccgctctaagtttttcctccctcccttaacccacatcc

SEQ ID NO: 7908 - DNA, 72 bp, Homo sapiens
gcctcgccctgatctgagcctgcgctcactccacacgtcacaaaccacagccctagcagaccccctgccctc

SEQ ID NO: 7909 - DNA, 72 bp, Homo sapiens
cccaacaggggcccgggagggacctgccccacctgcgggatgactaggcggggtcagaggggagggggcttc

SEQ ID NO: 7910 - DNA, 72 bp, Homo sapiens
ccatgattgcctcacacaagcataatcaatcgccacgagagactggatgccaaagagtatggctggcaaaaa

SEQ ID NO: 7911 - DNA, 72 bp, Homo sapiens
ggcagggggtggcaggggtgagtacacgggcagcacggaggtcttcccaacctctatggaaggtattgccat

SEQ ID NO: 7912 - DNA, 72 bp, Homo sapiens
acgaataaccctgccgccagccctcataccccccacgtggggagatctggatgataggtgtgttttctcctg

SEQ ID NO: 7913 - DNA, 72 bp, Homo sapiens
ttggctgagctgtttgagctcaaagaggtatcagacgtagcttactctggcattcgggacaacttccactac

SEQ ID NO: 7914 - DNA, 72 bp, Homo sapiens
agcacatccctgccggcagcatctgttactactgacgctcctctacttccctcttgcgctttctcaatggcg

SEQ ID NO: 7915 - DNA, 72 bp, Homo sapiens
tgtacttggggctgtccagcggcaggtcacttttacgttgcgttgagtgagcttcaaacgcggtttggaccc

SEQ ID NO: 7916 - DNA, 72 bp, Homo sapiens
gaaagacttgaaagaaaaatctttcggtaatctcacgagtcagctagggaaaaggtgctgaggctgaactcc

SEQ ID NO: 7917 - DNA, 72 bp, Homo sapiens
atgtatgtagtcagtttactccctcagtttctactcgctcagaaactgagtggactacatacgggaaattag

SEQ ID NO: 7918 - DNA, 72 bp, Homo sapiens
ggtgctccctgcatggcctcccggtctcttccagtcgagcctagtggagcaaaggatctcccctaggagatg

SEQ ID NO: 7919 - DNA, 72 bp, Homo sapiens
gctgggactgagtcatggcaggaagctgaggagggcgggagatcacaccagacaattataaaagaagagctg

SEQ ID NO: 7920 - DNA, 72 bp, Homo sapiens
tgccaggttcctttagaacgtgcagctggcctgttcgaaaacaagggttcccaaagtcttgtctactgccag

SEQ ID NO: 7921 - DNA, 72 bp, Homo sapiens
aggtgcgcccgaccgcatctgctggtgggtctgagcgtgcttggggtgtcccaggagaactgagagaacggc

SEQ ID NO: 7922 - DNA, 72 bp, Homo sapiens
ccgatgttaacatttttcaggcactgagcgggaatcgtctgtatctgagagattgggaagacctccgttgtg

SEQ ID NO: 7923 - DNA, 72 bp, Homo sapiens
gttgtacagaatatttcatcacccaggtattatgccgagtacccaatagttctcttttctgctcctctcctt

SEQ ID NO: 7924 - DNA, 72 bp, Homo sapiens
aaatggcctagcccgggaattcgatcggcaaagcacgggtgtgggggcgggggggtgggggggggcgagtgg

SEQ ID NO: 7925 - DNA, 72 bp, Homo sapiens
gaacttgtgcctttgccggtctgtggtcctgcggccgtctcatgagctgcagagtaggtctgtgtgtgtctc

SEQ ID NO: 7926 - DNA, 72 bp, Homo sapiens
tttcgcaatgtgttactcagtttcagggcctgccacgtgggggtgtttccattcctttctgcagctggactt

SEQ ID NO: 7927 - DNA, 72 bp, Homo sapiens
gccaggcctgggcgcggggcattgtgggaggtggacgccgctccggggcgggtaggtgagtggggaggggcg

SEQ ID NO: 7928 - DNA, 72 bp, Homo sapiens
catgataaacttgagcccctaacgaaagggtgtctcgaatttacttgtcctggtggcagagggtgagggaca

SEQ ID NO: 7929 - DNA, 72 bp, Homo sapiens
gggcaggagtcaagaggagaaagaggcccattctgcgcattcttgctggagagaggctttgcaaagggacct

SEQ ID NO: 7930 - DNA, 72 bp, Homo sapiens
cacacatcaacttggggcagctttgtaagcagcttcgcaagccctgaaacttctggctggtagggatgccag

SEQ ID NO: 7931 - DNA, 72 bp, Homo sapiens
tattgcgaccttctgcagagcttccccagctcctccgtatccaaaacagggctttgcacccagcaggctgtc

SEQ ID NO: 7932 - DNA, 72 bp, Homo sapiens
cactgccttgtaagtggtagaggcaggactcaacccgaggcagtctggcaccaaaatccacatcctcaccca

SEQ ID NO: 7933 - DNA, 72 bp, Homo sapiens
tctcaatcttgcctcacagtgactgcagcgccaagcggcatccaccaagcatcaagttggagaaaagggaac

SEQ ID NO: 7934 - DNA, 72 bp, Homo sapiens
agcatttcatcactggcttaaaaccctccagcctccgccttgctccctcatcctgtgaataaactccaaatc

SEQ ID NO: 7935 - DNA, 72 bp, Homo sapiens
accgtgtgacatagactggggagaaaccagaaggtcgggggaagggaaaagcaaagtccagaggcctggaca

SEQ ID NO: 7936 - DNA, 72 bp, Homo sapiens
gagccctggagggggcagagcccttggcacagtgccgcccccaggaggccgcacccctctgccccagccagg

SEQ ID NO: 7937 - DNA, 72 bp, Homo sapiens
ccagcaggccacctctgaagatcatttcataaacccgtttgaagatttgttgcccggttttgcattgattgg

SEQ ID NO: 7938 - DNA, 72 bp, Homo sapiens
cgtaatctctgggtagctaaagcccagcagcagcccgaggatcatgtgtcaaccctgtaatactgctctgtg

SEQ ID NO: 7939 - DNA, 72 bp, Homo sapiens
acagagacaccgggacacagagaggtacaacgggacgtggagttggatcgagctgtctcgtaaggaatatcg

SEQ ID NO: 7940 - DNA, 72 bp, Homo sapiens
cttacaaaagaaggtcatcggataacagtgagtaccgtgagtgaaccatccagccctttccattaggtggga

SEQ ID NO: 7941 - DNA, 72 bp, Homo sapiens
tctgtctccttcaaggcagccaagtctgaggaggtcgcagtgcttgcctccaccctcttttgccacctcgtt

SEQ ID NO: 7942 - DNA, 72 bp, Homo sapiens
ctcgtggtattgcaggacaacagccacaggggtgtcgaacactttctgttgttaaagtagtccttcaacctc

SEQ ID NO: 7943 - DNA, 72 bp, Homo sapiens
cgcagctttgaccctgaaacaggaaaggccaatgacggcggagctggtgcacacctccatgttctgcaaacc

SEQ ID NO: 7944 - DNA, 72 bp, Homo sapiens
cctctcccttgccctcctctgctcggctgtgatttcgctgtgcttctgtgggagaaaatgctataagtgact

SEQ ID NO: 7945 - DNA, 72 bp, Homo sapiens
gggccctggagctctattgacctggtacactgctccgggactcctcccccgccaccctccgcgcatagggtc

SEQ ID NO: 7946 - DNA, 72 bp, Homo sapiens
caccgaacagaagggaagatcgagacccaggcatgcggacagagagcacaggcttaacagagcctctgagcc

SEQ ID NO: 7947 - DNA, 72 bp, Homo sapiens
ttattatggtcttccctcttccggagatgttttgacggtgaaggaaaaacgttcttcctatagattagattc

SEQ ID NO: 7948 - DNA, 72 bp, Homo sapiens
tctcccataaacagcatgaatggcctggttaccttcgttccacgcagaagtggctcctccttatgtgttgtg

SEQ ID NO: 7949 - DNA, 72 bp, Homo sapiens
ccccagtgcagtgcagtctgtttaagaagtagtgtcgcatagctgtggcctggatctgctcagcagccccag

SEQ ID NO: 7950 - DNA, 72 bp, Homo sapiens
agtggctgctccgggtcgcaggtggcctttgctgccgggtcagtgctgtggtgaccgtcctcgggcagatgc

SEQ ID NO: 7951 - DNA, 72 bp, Homo sapiens
aagccgggtgtgaatgaacaggaatgagcaggagacgctcgctgatgccttctgtgatgtgtttcttcccca

SEQ ID NO: 7952 - DNA, 72 bp, Homo sapiens
gcttctttctccttcaaaccactctttggatattccggttcccactgcttcactgcgcttcactggtcagtg

SEQ ID NO: 7953 - DNA, 72 bp, Homo sapiens
aacaagtctccagagggcagtggcactcaaacccacgtacctggctggcctcccagaatgtgagctgagccc

SEQ ID NO: 7954 - DNA, 72 bp, Homo sapiens
tccttccccagggcagcctagcagcagaggaggctcgggccagcagagggaggaggcgcagacagtgagaga

SEQ ID NO: 7955 - DNA, 72 bp, Homo sapiens
gcgctcagtgaatatgaactattactcactcccagcgcggcagtctttctactctgtgctgagacagggaga

SEQ ID NO: 7956 - DNA, 72 bp, Homo sapiens
agagggtctacagtttacagttttagcgccaaacgcgccacaggaaatagtgcaaaataaaagggggaggag

SEQ ID NO: 7957 - DNA, 72 bp, Homo sapiens
gctcagggtggcctgggcctgagccagggatgaggcgaaacccaaccctggcctggccccgggccgcagccg

SEQ ID NO: 7958 - DNA, 72 bp, Homo sapiens
ggtggcggggtaggcgtaggcgggtggcttggacacgtcctccagcttctggatgaccttggccttcagggc

SEQ ID NO: 7959 - DNA, 72 bp, Homo sapiens
gcgctattcacacgggaatgcctgtgctcgttccgcgagagggttgcattccgccttttctctggtattctc

SEQ ID NO: 7960 - DNA, 72 bp, Homo sapiens
tcaaagccatcctggcccccatgcagcccacaggccgtaggttggacaagcttggtctacagtttctctcca

SEQ ID NO: 7961 - DNA, 72 bp, Homo sapiens
cacccctagcagcatagccacagcatacttgtacacgccttgaggacagacttccccagcccaccccaaaca

SEQ ID NO: 7962 - DNA, 72 bp, Homo sapiens
ccttgcactcttgtgagactcaaccatgccattcacgctgtctctccttatcactatcttaggccaatctcc

SEQ ID NO: 7963 - DNA, 72 bp, Homo sapiens
aagaacttccaattcggttttgaatgctaaactggcggggcccccaccttgcactctcgccgcgcgcttctt

SEQ ID NO: 7964 - DNA, 72 bp, Homo sapiens
cgagaaggggggcaggacactgggctctttgcttgcggtggaactagtttgcacttagtagcaacaccctca

SEQ ID NO: 7965 - DNA, 72 bp, Homo sapiens
ccagagagcaggatcaattccccaaaaggctctctcgcctgctcagcacctgattctgtgctaggagtatgg

SEQ ID NO: 7966 - DNA, 72 bp, Homo sapiens
ggaagccaagccagaaagcccaggacatccctgagcgcctgtcaccatggcaacctgcccgctctgcccccc

SEQ ID NO: 7967 - DNA, 72 bp, Homo sapiens
gtgtgagcgcacgatgggcagtcacgccgcacacacgctctgctcatgtccctccccgggaccctccgaccg

SEQ ID NO: 7968 - DNA, 72 bp, Homo sapiens
ccacacaaccagagcccacacaaggagggagacttcggtgatgttgtaacaccaatctcagcattggtgaga

SEQ ID NO: 7969 - DNA, 72 bp, Homo sapiens
gctgcaatctccgctctttgggaggccaaggcaggcggctgggaggtggttgtagcaagccgagatcacgcc

SEQ ID NO: 7970 - DNA, 72 bp, Homo sapiens
cggggatgttcggccgacgccaccatagaggaagtcgtagaggtgttgtccttcaggatccccttgaggggc

SEQ ID NO: 7971 - DNA, 72 bp, Homo sapiens
tgttttcctttaataaacatccttacagtatatgacgagcctgtggctttcaagctgtggacatctggccta

SEQ ID NO: 7972 - DNA, 72 bp, Homo sapiens
cgtggtttttaaaggcttggctagcgtgcccccggcggtactaaaagagggctgcttgcgccaatctcattc

SEQ ID NO: 7973 - DNA, 72 bp, Homo sapiens
atgtccagggcttgttcactatgggaccagcagcacgtagcccagtctggagcaaagagcctccttcctgtg

SEQ ID NO: 7974 - DNA, 72 bp, Homo sapiens
tttctcgcattcatgtgtaggaaaaaccatggagacgtgtccctggagggcaggttgtaaactgcaacagtt

SEQ ID NO: 7975 - DNA, 72 bp, Homo sapiens
tgggaaaaattccttcggtgttgtcaggcagggttcgctagctgcagctttttttttttttttttaaacaat

SEQ ID NO: 7976 - DNA, 72 bp, Homo sapiens
acagcaaaacataaaaccaacacagaaaacttcctcgttcaatgtggcaattcattttgagggaactactaa

SEQ ID NO: 7977 - DNA, 72 bp, Homo sapiens
agggcagggagaagggaaaggaaaggcctgggacacgtggtttggatcactggctgtggctcacagttctga

SEQ ID NO: 7978 - DNA, 72 bp, Homo sapiens
aagggcactgtgaaagtggatctgatttgagaagccgtttcctgatgtgggcagccatgtgatgccagcccc

SEQ ID NO: 7979 - DNA, 72 bp, Homo sapiens
aaaactttcccaggcgattccaccacttctcacaccgaagcgcatcagcccggggtcccgacctcttgggtt

SEQ ID NO: 7980 - DNA, 72 bp, Homo sapiens
aggctctcgagtcctgacatcatcctctaccgccacgctttccagctgtcagccttggtctccatctggttc

SEQ ID NO: 7981 - DNA, 72 bp, Homo sapiens
ccctgtgccctgcaggggaatttggggaagtgtgccgtggtcgactgaaacagcctggccgccgagaggtgt

SEQ ID NO: 7982 - DNA, 72 bp, Homo sapiens
atgttagatttcaacatacgagtgtggcatgggaccgaattccacctctaagaggtcaaatagagtcaaaac

SEQ ID NO: 7983 - DNA, 72 bp, Homo sapiens
gggagggctggggttttcgcactgacaaaaactcacgtcaaccacctggccttggcccatggggatcccatg

SEQ ID NO: 7984 - DNA, 72 bp, Homo sapiens
gagttcccatttgctgacagccaacgcctttgccacgtttaaacaggagaactaaaggcttggagagttcaa

SEQ ID NO: 7985 - DNA, 72 bp, Homo sapiens
tcttagcctcgctgggcctcggtgtcctgtccgtacggtggcggctgtaatacctttcttgtagggtcatgg

SEQ ID NO: 7986 - DNA, 72 bp, Homo sapiens
tgtggttccacccagccttccaaccaataacgcagcgtctcctgcaggaaactcatcgcttgggtcacctgt

SEQ ID NO: 7987 - DNA, 72 bp, Homo sapiens
atgaatgtacccacctcctaagaacacacacccagcgtgagggtaaatattaccatttccaaaacataaaat

SEQ ID NO: 7988 - DNA, 72 bp, Homo sapiens
ccgcttaaaacaccgtgtgacactaatcgtctccgcgtgagcagctggtctctccagaaattgtgtatcaca

SEQ ID NO: 7989 - DNA, 72 bp, Homo sapiens
gcctctgacccctggagggccctggaggctgctgccggctccccccgggggcagatggaggtcactgtcacc

SEQ ID NO: 7990 - DNA, 72 bp, Homo sapiens
aaatacatatcccaggcagcactaaatgcattctccgtatcacaggcgatactaaatttagaactggcagtt

SEQ ID NO: 7991 - DNA, 72 bp, Homo sapiens
gttcttcctatccgacctctaccccactcccactccgtcaccgcagggctttggcatactaccattcaggta

SEQ ID NO: 7992 - DNA, 72 bp, Homo sapiens
ttggctcataaaatcatgagtcactgcagcagctccgtgcagaaaagtccacagtgtgggagtggtgaggag

SEQ ID NO: 7993 - DNA, 72 bp, Homo sapiens
tgtttctttaatttcccccccgtctgtccctggaacgtgataaaaatacccagcattgatctttttttcttc

SEQ ID NO: 7994 - DNA, 72 bp, Homo sapiens
gcttgcatcagccacaaactggatttccaacctgccgaacaacagccttgccttcattctggcagatgctgg

SEQ ID NO: 7995 - DNA, 72 bp, Homo sapiens
cctgactgataagagtggccagtggagtgcttcctcgaggtccctgctaattactgggaagtccctgaaagc

SEQ ID NO: 7996 - DNA, 72 bp, Homo sapiens
tgtttttcttgtgtatttatgatcacctaatttcacgttttgtgaaatggacagtaacctgtttcctgaaag

SEQ ID NO: 7997 - DNA, 72 bp, Homo sapiens
gcgctagaaatgcgccggggcctgcggggcagttgcgcaagttgtgatcgggccgctataagaggggcgggc

SEQ ID NO: 7998 - DNA, 72 bp, Homo sapiens
ggggtgttgttgtgagtccaaggcacctctgaatgcggccaccttccctccccacctcgctgcccaaagctc

SEQ ID NO: 7999 - DNA, 72 bp, Homo sapiens
tttactacctgcatttcctcttttgtgaagctggccgcctcatcccccaattcatgaagatacatgcagtca

SEQ ID NO: 8000 - DNA, 72 bp, Homo sapiens
cacaggaacactggatgtgtaaacgtggagatctgcggagtggcagagcaggagagggcgctaaggggcatt

SEQ ID NO: 8001 - DNA, 72 bp, Homo sapiens
agttaagggaaatcatcctctttgtgtgtgggtgccgtcctagggaggagaagacaagaaagtggatgtgtt

SEQ ID NO: 8002 - DNA, 72 bp, Homo sapiens
atggttgatgctatcatcttaagtcagacctcagtcgtaaaaatttaagctaagcctatcctaaataaaatt

SEQ ID NO: 8003 - DNA, 72 bp, Homo sapiens
gccggatcctgccatgcttgagccaaagctctgggcgattcccatgtggctcaggctgaaagcggagctctc

SEQ ID NO: 8004 - DNA, 72 bp, Homo sapiens
gccaatttgccctctgtccatgcagtaattgggggcgactggggcattggaatcaggcatacttgtatttcg

SEQ ID NO: 8005 - DNA, 72 bp, Homo sapiens
aatggttgtggtggctttatacagttgtgttctatcgcgccttttgcagcaacatggatgcatctggaggcc

SEQ ID NO: 8006 - DNA, 72 bp, Homo sapiens
gggggttcacagtaatcatggtctactcctctttccgtggctgggggtagacttaataaagagagaaattca

SEQ ID NO: 8007 - DNA, 72 bp, Homo sapiens
actcttatgcccaattggtcctctgccagtgaaggcggggaaggtgaacctgtggccgtcggcagatctgca

SEQ ID NO: 8008 - DNA, 72 bp, Homo sapiens
aggaatgcgcttggactttcgtcctctgttttctccgatctgctcacacacagcctgctttcctgttgccca

SEQ ID NO: 8009 - DNA, 72 bp, Homo sapiens
gtatatccgcaacagttggctctgattgcagagagcgcgcttgtgagaactgatggcgggtacgcgcagaaa

SEQ ID NO: 8010 - DNA, 72 bp, Homo sapiens
actctgaaatttttctagctctgggcggagaaggacgcctagggattgtctccatagttaacaggggaaggc

SEQ ID NO: 8011 - DNA, 72 bp, Homo sapiens
cttcggatacactgtcccatgacttctccgtccaccgacagtccttcttaggcccttggctttcccatgcca

SEQ ID NO: 8012 - DNA, 72 bp, Homo sapiens
gaccccagagcccgggctgtctcagtgccccttggcggccgtgtggctcgctttctgcagtgccgcttcctc

SEQ ID NO: 8013 - DNA, 72 bp, Homo sapiens
aagggctggaagacggcgtggtgacaggaagacaacgtggtgtgcagagagaagattgaactgtacatgaag

SEQ ID NO: 8014 - DNA, 72 bp, Homo sapiens
agtgctcgctggcggccacgcacagcgagggggggcggccagtccccagacccctcacaggtgcaggcccag

SEQ ID NO: 8015 - DNA, 72 bp, Homo sapiens
caccccggagccaatagcagaggaagagctggtgccggcctactcagctgtctgctaaagaaattccccagg

SEQ ID NO: 8016 - DNA, 72 bp, Homo sapiens
taggcaggtgctatgggacgtttatgatgatgttgcgcagtcatgtagttctgaatttgcttacggttttag

SEQ ID NO: 8017 - DNA, 72 bp, Homo sapiens
accaaagtccttcctttacaattggccacatcaaacgaatcaaagtcaaggcactccctactccccaactct

SEQ ID NO: 8018 - DNA, 72 bp, Homo sapiens
aaactagtgacagcttgtggctttttattagagctcgccacgaactagggtaaggtgagtgtcttagcatat

SEQ ID NO: 8019 - DNA, 72 bp, Homo sapiens
ttgggaccttgagcccaaagcccccacctcctccccggagtccgttctgactcccaggctcccaaggcaaaa

SEQ ID NO: 8020 - DNA, 72 bp, Homo sapiens
caaagcaaataattaatacgcactgaatgagcaaacgacagacaggcattagctcatttcctgtagtcttgc

SEQ ID NO: 8021 - DNA, 72 bp, Homo sapiens
tctttgccctcggccaggagcacatctccctgttgcgttttttgggggagacagagaggggcgggcctgagt

SEQ ID NO: 8022 - DNA, 72 bp, Homo sapiens
cacccgtgggggtggggcagagcagcctcagggagcggagccgtgtggacttccagcccagggcccagactg

SEQ ID NO: 8023 - DNA, 72 bp, Homo sapiens
aagggctttgtgttgcttaacccagcatcctgaaccgtgtttgttgaatgaatacagaaccccgtttgctct

SEQ ID NO: 8024 - DNA, 72 bp, Homo sapiens
gcagcgtcgccacgtgtcggggctggcctgagttccgtgtccctggaatctacagcctgtgttccgtgaagg

SEQ ID NO: 8025 - DNA, 72 bp, Homo sapiens
gctcttgctgctatggaaggacaggagtgagctcccgctcttgacaggaaactctccaggagcagaagctgt

SEQ ID NO: 8026 - DNA, 72 bp, Homo sapiens
tatatcagagcgcggagtccggcaggggaaaggaacggaaagacagttgtgaagttgccttaacctgtgccc

SEQ ID NO: 8027 - DNA, 72 bp, Homo sapiens
ttactctgctagttacaagttttaaagtcacgctacggcattatcaccctggcaggtaggttttgttattgt

SEQ ID NO: 8028 - DNA, 72 bp, Homo sapiens
atgacaacagtgccgcaaactggagagactctcctcggcgcggcctatcaggagatgggaaacgcgcctccc

SEQ ID NO: 8029 - DNA, 72 bp, Homo sapiens
ggggaggcgctacattgtgtaacactcagcagccacgctacacttgggaagagcggatgtgctgaaaatgcc

SEQ ID NO: 8030 - DNA, 72 bp, Homo sapiens
atacatggttaaccatttgcatttgggcaaataggcgttacttttcaataggaagtggcaatccagaacttg

SEQ ID NO: 8031 - DNA, 72 bp, Homo sapiens
gagtttccctgggtcaagcatgtcaccgtccagctcgggtgttccatctgtgaaatgtgcaaggggcattta

SEQ ID NO: 8032 - DNA, 72 bp, Homo sapiens
cccctcgtgctccccaggctgggtgtcccgctgggcgccttccacgccagcctcctgcactgtctgctgcca

SEQ ID NO: 8033 - DNA, 72 bp, Homo sapiens
gtcccggtatccagtctgggcaggaagcagcgggccgtgagccagctctccagggggctgacggacatcttc

SEQ ID NO: 8034 - DNA, 72 bp, Homo sapiens
tcgccagcggggtgtggctcccctccaaagacggtcggctgacaggctccacagagctccactcacgctcag

SEQ ID NO: 8035 - DNA, 72 bp, Homo sapiens
tgagatcaagcgcagcctgtgctggttgtgtaagccgtggaacgtatgagaaagccaggaagaagagcaccc

SEQ ID NO: 8036 - DNA, 72 bp, Homo sapiens
ctcctgggagcagaggcaagcgggaatgacaagagcgaaagctgaaagaaggatgccacaagagaaaactgc

SEQ ID NO: 8037 - DNA, 72 bp, Homo sapiens
tataacaaggaaatgatagcacattttaaagacgacgacatggattttattttgtcaagttgtttttttcca

SEQ ID NO: 8038 - DNA, 72 bp, Homo sapiens
gaaataaaaccctgggaaaaagaaaacgcggaatccggttgctcttctcacagtagccagaaggaagggcag

SEQ ID NO: 8039 - DNA, 72 bp, Homo sapiens
tgcttgtgctcagctccagctcactggctggccaccgagacttctggacaggaaactgcaccatcctcttct

SEQ ID NO: 8040 - DNA, 72 bp, Homo sapiens
gcagagcatggcacccagcacccgacaggcgaggacggcccaggacaaagcggcagctctagctgtcctcag

SEQ ID NO: 8041 - DNA, 72 bp, Homo sapiens
agcgtgtattcccagcctgactcttggtcaccactcgttctgttatttgcagtcagtaacaaagattcatcc

SEQ ID NO: 8042 - DNA, 72 bp, Homo sapiens
gggaggaggagacaggagagaggagaacgctgccacgccccgcccggctcccacccgtcactctgcctccgc

SEQ ID NO: 8043 - DNA, 72 bp, Homo sapiens
ccacttattgggcacttaaagaagtgagtatgacacggccctgccctagaagaccttgcagtctaggaagga

SEQ ID NO: 8044 - DNA, 72 bp, Homo sapiens
agacttcaaatttcattcatcagggtactagcatgcgaaacacaggccattccaaaatgccacgtgcagccc

SEQ ID NO: 8045 - DNA, 72 bp, Homo sapiens
cagggacagctggctttccttctgccccaagggaccggcgagggcggggcgccgtgcccagcttctgccccg

SEQ ID NO: 8046 - DNA, 72 bp, Homo sapiens
caggaatgttctcctggcctgctggtctgtgccggcgagtgtgctgagaggagggcctctggacatcaaagg

SEQ ID NO: 8047 - DNA, 72 bp, Homo sapiens
cagcagtaataacagtgcagtgatcagatttccttcgttaaaaaagggctctctagacacagaagatcatga

SEQ ID NO: 8048 - DNA, 72 bp, Homo sapiens
aaagggccaggttccctctatccagctgggggcaccgagacggcctcattcagggaagtccaggatggcagc

SEQ ID NO: 8049 - DNA, 72 bp, Homo sapiens
gattttgcaaccctaccctctctgcagggtacctccggtggctctggcctctgggccccatgctgtgccaga

SEQ ID NO: 8050 - DNA, 72 bp, Homo sapiens
tgttctcttcaatgaaggaaacctgcagtcgggagcgctcagtcatctcgaagcccagaagcccagtctctg

SEQ ID NO: 8051 - DNA, 72 bp, Homo sapiens
aagctttggccttggtaaaggagctgcagtgcctccgctttgccacagggtggcaacagttgcttcccattt

SEQ ID NO: 8052 - DNA, 72 bp, Homo sapiens
cggcaccgtgcgtattttgcagcgtatatgctctacgtggggagctttgtaaaagtgttttctgttctggta

SEQ ID NO: 8053 - DNA, 72 bp, Homo sapiens
ggagtgtgactaggtgtgacagtttctgagtctatcgcctctccacctgctctctcctgagcttggtgccaa

SEQ ID NO: 8054 - DNA, 72 bp, Homo sapiens
actcaggtttgtcagactccagagtgacctcttaacggtcatgcttgctactctggctcttgaacctgaaac

SEQ ID NO: 8055 - DNA, 72 bp, Homo sapiens
tggcttcttgtctccactccactagttaccatctgcgtggctcagagctaatgatttcttctgtgagcccca

SEQ ID NO: 8056 - DNA, 72 bp, Homo sapiens
ctaggggatattctcagactataaacaacctcattcgccacctccatttgcttccaacctctgtacatactt

SEQ ID NO: 8057 - DNA, 72 bp, Homo sapiens
ctattaaccaaggaatgggtgcccagacagagcaacgtaggccacaggaggtaatgcaatcgataagaccct

SEQ ID NO: 8058 - DNA, 72 bp, Homo sapiens
gcccacatttacgtaactgaaggagaccattcacacgattgttctaagaacaaagacttcctctaagaagat

SEQ ID NO: 8059 - DNA, 72 bp, Homo sapiens
ggctccctgtttgttgtgaaacacacgcagctccccgacagcaggcaacgctcgtggtaaacacaaaacccc

SEQ ID NO: 8060 - DNA, 72 bp, Homo sapiens
ccctgcaaatggaaatgtgacccccagcactagcccgctccaggaagtcctgcgaattcgaaatcgactgtt

SEQ ID NO: 8061 - DNA, 72 bp, Homo sapiens
atcagaaatctagacctgaacccagggtagcccttcggtcaaactgccacataagtgattaattactaacca

SEQ ID NO: 8062 - DNA, 72 bp, Homo sapiens
tttgtttgttttgtcgagatggagtctcactccgtcgcccaggctggcgtgcagtgtcacgatctcggctca

SEQ ID NO: 8063 - DNA, 72 bp, Homo sapiens
ctgggccgtggccagataggagtttgcatcatccacgtggctccgttgcctctgcattgcgccctgtcctgt

SEQ ID NO: 8064 - DNA, 72 bp, Homo sapiens
gcggccaagacagagacagggggtgagattagagacggagagacccagagagctggagacagagcccagaca

SEQ ID NO: 8065 - DNA, 72 bp, Homo sapiens
atgcccatttttcagataaagaatctgagggccctcgaggagaaaccacttgcccaacatgagccctggtct

SEQ ID NO: 8066 - DNA, 72 bp, Homo sapiens
ggtcctggaagtatatgttagtccctctctcttctcgttcctaaggagtcgttctccggacccagcatcctt

SEQ ID NO: 8067 - DNA, 72 bp, Homo sapiens
attgaaataataaacatttttcttattcaagatttcgtcatggctattgtaaaggaaaccctaggaaaatgg

SEQ ID NO: 8068 - DNA, 72 bp, Homo sapiens
tgggttagcatcttttataaaacgggcaggcagagcggcttatgaaattaaccttggaaaccacgcggccac

SEQ ID NO: 8069 - DNA, 72 bp, Homo sapiens
tattctttgaccaatatattgcaacagattgagtgcgaagagaagtatatgattccagctgtcttctattaa

SEQ ID NO: 8070 - DNA, 72 bp, Homo sapiens
aggtcatcatgggggctcctcacaaatgcccggtacggggccgccccgggaggatgatgtggctggctcaca

SEQ ID NO: 8071 - DNA, 72 bp, Homo sapiens
tttaagaaatagggatagtcatagtgtttactgtacgcagttgttctgaggagaaattaggaaaaggtatgc

SEQ ID NO: 8072 - DNA, 72 bp, Homo sapiens
tgttcattgaggaatgagactgtgttaggctgtcacgagcctcctttgccacaacaaaaactctgttccatc

SEQ ID NO: 8073 - DNA, 72 bp, Homo sapiens
aggctaggtcattgaaccgccggccacgccgggggcgctgggaaaggggatggggccctccgccctggcggg

SEQ ID NO: 8074 - DNA, 72 bp, Homo sapiens
ccccacccccttcccaaggaaggatcaggaatgcccgtgaggctttctcacggtaacgtaaggctctgtaca

SEQ ID NO: 8075 - DNA, 72 bp, Homo sapiens
cacgctgtgtccatcgcccaggatgacgcgggggccgatgactgggagaccgaccctgattttgtggtagga

SEQ ID NO: 8076 - DNA, 72 bp, Homo sapiens
gagtctgggtctccgtgcagccttaggcctccttgcgctgggcgcacccgggtccgggctccggagtctggg

SEQ ID NO: 8077 - DNA, 72 bp, Homo sapiens
tgtgtacatgctgtttttattgttactcatgaagacgcgggggaagctttggttgtgtaaagctgagaactg

SEQ ID NO: 8078 - DNA, 72 bp, Homo sapiens
aattgcgtgttccagattggggcctggcagccccacgctcccctcatgccctgcatcagacctcatcctctt

SEQ ID NO: 8079 - DNA, 72 bp, Homo sapiens
gtacatgtaaacagcattttgcttcacttcttgcccgatctatctaatgaggctcagagcctcagttggcac

SEQ ID NO: 8080 - DNA, 72 bp, Homo sapiens
ccgagctcggcatctggagcagttcaaggcagcagcgagcaagtccaaagacgcaggagggagggtggggtg

SEQ ID NO: 8081 - DNA, 72 bp, Homo sapiens
agcagacagactctaaccaggcctcgctctgttttcgatgcaacacaaatgttttccattaaaagttccctg

SEQ ID NO: 8082 - DNA, 72 bp, Homo sapiens
cctgacagctgtggcctaatttccagggctataaccgggctccttatttttacccacttggtatttttcatt

SEQ ID NO: 8083 - DNA, 72 bp, Homo sapiens
gctcagccactgactagccagacaaactcaaataacgtacacagcttctcagcacctcaccccctcattcat

SEQ ID NO: 8084 - DNA, 72 bp, Homo sapiens
cttccagcttggcatccatactcgaggactggattcgttcatggagctgctgggcgttctgagccttatggg

SEQ ID NO: 8085 - DNA, 72 bp, Homo sapiens
cagagaatcagacccaaaaagggctggaggagactcgggagagccacccacacaacccaggccctgcacgcg

SEQ ID NO: 8086 - DNA, 72 bp, Homo sapiens
aaaatcaacaaaacgtctgggattaaaactaatctcgagcaatgaaataaaactgcacatagggatcattat

SEQ ID NO: 8087 - DNA, 72 bp, Homo sapiens
tatgacttaccaaaaaaaaaaaaatcacagaatcacgaaggtggaagaaatcagtcaaacccttggagacta

SEQ ID NO: 8088 - DNA, 72 bp, Homo sapiens
gtcggcagcgttcctgatctcctgcgggccgggtgcgaggatggcttttgtcactctggcagcagacaccaa

SEQ ID NO: 8089 - DNA, 72 bp, Homo sapiens
tgaataggtaaaacatatgcatgtttttcttcccacgtttcctgatcctatttcaaagcatatgcaaagtct

SEQ ID NO: 8090 - DNA, 72 bp, Homo sapiens
cagacgagcaattcaagagctaacaaggcaacatgcgccaaaagccttgtaaacctcagggcagtacaattc

SEQ ID NO: 8091 - DNA, 72 bp, Homo sapiens
accagataataatgcctagcgccattcgtgccaagcgtctggggttgaaccattcaagcagagaaagagagt

SEQ ID NO: 8092 - DNA, 72 bp, Homo sapiens
actgtgttccatgccagttccccagtaagctggagcggagggccagtgtggtgttgagggtgggagttgggg

SEQ ID NO: 8093 - DNA, 72 bp, Homo sapiens
acacactccaggaagccttttgcagaacagtgaaccggcctggcttttgttgtgtatgtttgtttccttttt

SEQ ID NO: 8094 - DNA, 72 bp, Homo sapiens
tgtgctcccctcacccccaaccccgacacagcaggcgctcatgagtaggggcgaaatgaatgaatgaccagc

SEQ ID NO: 8095 - DNA, 72 bp, Homo sapiens
cagggccactcacttccttggtaggtgggggatgccggcctgggcctcccgagacttgagccctgcccctgc

SEQ ID NO: 8096 - DNA, 72 bp, Homo sapiens
gggtgggccccaatccaacacagctggtgtcactacgaaaaggggaaattttggacaccagcacccacacag

SEQ ID NO: 8097 - DNA, 72 bp, Homo sapiens
gccctctctccctctggctctttggcaggtggccacgcttgtatcacatggggaatttggcaaatcaagtcc

SEQ ID NO: 8098 - DNA, 72 bp, Homo sapiens
ttcttctcccacatatatagtctagagaaattgcacgtgaacatcagatgttcaaaatgttcttaaacacat

SEQ ID NO: 8099 - DNA, 72 bp, Homo sapiens
cgagagcgcaagcgcaagcgggagtccaagtacagcgggatcgacgaggctctgctctgctggtaccacatt

SEQ ID NO: 8100 - DNA, 72 bp, Homo sapiens
gaccaaaccacaatggggtcactcatgctaggtaccgcctaatcgaactgaattctgaaacagactagtttt

SEQ ID NO: 8101 - DNA, 72 bp, Homo sapiens
gcagctggctgaaatggtggaggccacctagatggcggaactttctgggtcacacacttcctgctcccttcc

SEQ ID NO: 8102 - DNA, 72 bp, Homo sapiens
ccccctctggaagtcacggcccccaggcccagccacgccggctctgcacacctggctgtggcatcgtccccg

SEQ ID NO: 8103 - DNA, 72 bp, Homo sapiens
tttatgtcattgtgtgcaatagagtaaactctccacgtacactccccagactgctgactggtctcatgctcg

SEQ ID NO: 8104 - DNA, 72 bp, Homo sapiens
tcttctcttcagggtgcctaactagaatttgtcctcgagaaaaagaataggaaagttcccatgaccccagga

SEQ ID NO: 8105 - DNA, 72 bp, Homo sapiens
ttatttccatcttcttcaattaaagcacaagatatcgtactcaatttccatttgatcttccaaaagaaaagt

SEQ ID NO: 8106 - DNA, 72 bp, Homo sapiens
gaccccctaccccacccagtcctccctgcacaccacgccccttcctcagaagtcctgagacaggagcctggc

SEQ ID NO: 8107 - DNA, 72 bp, Homo sapiens
tatatgtggaacttttagtgaaacagaccctatgccgagccataaaacaagcctcaacaaatttcaaaggaa

SEQ ID NO: 8108 - DNA, 72 bp, Homo sapiens
ccgcctgggggccagaaccacctcccaggggcttccgccagtgccgcagttgctgaccccaggcaaacctcg

SEQ ID NO: 8109 - DNA, 72 bp, Homo sapiens
gcccctccacgtcatcccctccgccctcccctcgacgtggcccctcgctttgcacaactgcccccttcagca

SEQ ID NO: 8110 - DNA, 72 bp, Homo sapiens
cttagtacggacatcctggcccaaggacatgtgcacgtatatcctgaggctccccctaaaactgtgttgtgc

SEQ ID NO: 8111 - DNA, 72 bp, Homo sapiens
tacgggcggttacatccgccatggccgcggctgctcggaggcttcagaccaccacgcctccctaccgcaagc

SEQ ID NO: 8112 - DNA, 72 bp, Homo sapiens
cttacggcagcaagatggcaatgccaagcaggagacgcagcacatcttgccacagcttcctcctggccagag

SEQ ID NO: 8113 - DNA, 72 bp, Homo sapiens
tgagctgagatagcgccactgcgctcctgcctgggcgacagagtgagaacctgactcaaaacaaagaaaaaa

SEQ ID NO: 8114 - DNA, 72 bp, Homo sapiens
atctgaaggccaggggtcagagagtgagaggcgagcgaaatttcaactcaaattaacattctgtcagctcca

SEQ ID NO: 8115 - DNA, 72 bp, Homo sapiens
cccagtgctccacccaatgtagctaactttgtcgtcgcgtagcaacagaacctcgccatactggaagcgggg

SEQ ID NO: 8116 - DNA, 72 bp, Homo sapiens
agagaaatcacagagccttggttcagacccatgcacgtcagttccttacattctgtgacttggcttgtcccc

SEQ ID NO: 8117 - DNA, 72 bp, Homo sapiens
tccctgtgcaaggggcggggcaggcaatgggtgcacgcatgcgtgtatgagacgtgtgcacaggggagagtc

SEQ ID NO: 8118 - DNA, 72 bp, Homo sapiens
cagatctctgccccgccctccccatcctgaagccccgcctccaagtgctccccagaccggtcagtgaggccc

SEQ ID NO: 8119 - DNA, 72 bp, Homo sapiens
agttgctggcttaggcttggcaccagcccagcccacggcgctgggacactcctgctgccgcctcccagagca

SEQ ID NO: 8120 - DNA, 72 bp, Homo sapiens
caaagcaaacaccacatgaaaagcctacaggtctgcgtgaaaacagtaggggagccctaagctccagcccag

SEQ ID NO: 8121 - DNA, 72 bp, Homo sapiens
cccgaggaggagcgtcgtggtcaattttaaaaatacgaactcaagagcagagttgtgtgaggacacacactt

SEQ ID NO: 8122 - DNA, 72 bp, Homo sapiens
accgctcagggtaagaagccagtcccaaagcaccacgtgtcatccaaggtcatttacaggaaacgctcagaa

SEQ ID NO: 8123 - DNA, 72 bp, Homo sapiens
cctcacagccacccccgccccgaccgcgccccgcgcggctcgaagcaccttcccaaggggctggtccttgcg

SEQ ID NO: 8124 - DNA, 72 bp, Homo sapiens
cctgcttgcagcctggatctgctgtgccctgagcccgccctcctcccctccgcgccccaccccaccccagaa

SEQ ID NO: 8125 - DNA, 72 bp, Homo sapiens
aggtgggattaaggccctcacagctgctgttcagacggttatgaaccaagacttcttggccttttcttaaat

SEQ ID NO: 8126 - DNA, 72 bp, Homo sapiens
ggtctttatttatttagaagtcctgtttgcaggggcgttccctggttaccctgcctaactcttgcctgttta

SEQ ID NO: 8127 - DNA, 72 bp, Homo sapiens
gccaaggctggctgcaggcggtccttgtcctaggacgcttggcacggggctgttccgggcgccagagggaag

SEQ ID NO: 8128 - DNA, 72 bp, Homo sapiens
cctggctctagtctcagccccacctcagacctgctcggttatctctgacaactcacagtgccactggaactg

SEQ ID NO: 8129 - DNA, 72 bp, Homo sapiens
gctcttcccgacccttgtcgtgctttgtcattctccggttcaggcgggtgcattgatctgctttcgctgagg

SEQ ID NO: 8130 - DNA, 72 bp, Homo sapiens
tcccaaagtgctgggattacaggtgtgagccactgcgcgcggcctcctggcctcttattaatggtggctttt

SEQ ID NO: 8131 - DNA, 72 bp, Homo sapiens
gtctattgctggctggtggctctcctgacaggccccgtatgtctcactttatatctctgggagtctgtggtt

SEQ ID NO: 8132 - DNA, 72 bp, Homo sapiens
cgcagggagagagaccccagctgcccaagtcctcccggctatcctatctgcgacaacagtaaatgaggccat

SEQ ID NO: 8133 - DNA, 72 bp, Homo sapiens
aagaggaagaaggaggaaggaaaaggagcgcagagcgggttacactgccaggagatcctgggaagctaggtc

SEQ ID NO: 8134 - DNA, 72 bp, Homo sapiens
accacagccaggccccccacacttcctctctccttcgtcagttctgcagtttggcccgccacattcagtctc

SEQ ID NO: 8135 - DNA, 72 bp, Homo sapiens
ccactgggacggctctgacggggcatttcccagcccggctccaaacacacacaacgctgggcccagtaaata

SEQ ID NO: 8136 - DNA, 72 bp, Homo sapiens
cttttttgttttggtttggcgggagctctcagacccgcccagccccacttaggctcctttctccaatctcaa

SEQ ID NO: 8137 - DNA, 72 bp, Homo sapiens
ttttacaggtgaggaaaattgaggctgaaatggctcgagaaaggatttaggttggttaggcttatagtcatg

SEQ ID NO: 8138 - DNA, 72 bp, Homo sapiens
gtgctggaacatgagccagcagcgatggaaagtggcgaggggaggggaatccccgtgctcgctcgggccagt

SEQ ID NO: 8139 - DNA, 72 bp, Homo sapiens
aaagccagcgttgggaaagcctgtgcattaggcagcgctgttctgcctgcagggaacgattgcacaactgat

SEQ ID NO: 8140 - DNA, 72 bp, Homo sapiens
gaggcggaaccagggcgggccgtggggcgcatgcgcggccggcgtccagctctccgggaacccggtacctat

SEQ ID NO: 8141 - DNA, 72 bp, Homo sapiens
ttagtagttctctcataatgaattgccacattgaacgaggaagttttctgtgttggttttatgttttgatgt

SEQ ID NO: 8142 - DNA, 72 bp, Homo sapiens
ttttgcgtagatgagaaaaacctaggctaggagagcgcagtgtcctcacatggctggtgcagcctctgatcc

SEQ ID NO: 8143 - DNA, 72 bp, Homo sapiens
tcaatggcgaagggctgacaatagcacccagggctcgcggtgtcctcggggccccatccgctgcaccaccca

SEQ ID NO: 8144 - DNA, 72 bp, Homo sapiens
ccagttctcagaaacttcattctcctatggaggaacgtcagctggtttgcagtgacagttgtcacagactac

SEQ ID NO: 8145 - DNA, 72 bp, Homo sapiens
agattctccctacaaggattacattagatagagatcgtcaaaaccagaaatgatcaacctgaaacacttcct

SEQ ID NO: 8146 - DNA, 72 bp, Homo sapiens
ctgcctcctaggtctctgccctgcctggtttagatcgaagtgattaaccttctcccgggagctcggggaggg

SEQ ID NO: 8147 - DNA, 72 bp, Homo sapiens
aaacaaatgcagacatcagtaacacactgggtgcccgagagggaggtgaaagtaagtgaagaaagagggatg

SEQ ID NO: 8148 - DNA, 72 bp, Homo sapiens
ggggcccacaggacaggcgagggtggctgtcctgacggcctggcagtggggccagacagacctctgtggaat

SEQ ID NO: 8149 - DNA, 72 bp, Homo sapiens
gcattctcccagggtgcccagagcccagggaaagacggggacggcagaaggaactgcaggtggcgcccacag

SEQ ID NO: 8150 - DNA, 72 bp, Homo sapiens
gaacttaggcaaaatattcatcgcaaagtctctagcgtcatatttttctcacccaaattacgtttccacgag

SEQ ID NO: 8151 - DNA, 72 bp, Homo sapiens
atcgccctgaacgaggacctgcactcctggaccgccgcgaacacagcggctcagatctcccagcacaagtgg

SEQ ID NO: 8152 - DNA, 72 bp, Homo sapiens
ctgatatctggaagattgtctgtgagcctagatctcgttcctttttttttttttttttcttgagatagggtc

SEQ ID NO: 8153 - DNA, 72 bp, Homo sapiens
tgatgaaatctcacaccgtcttgcttcacccctcccggcctgtgaatcctccggctgttcagtgtatctgaa

SEQ ID NO: 8154 - DNA, 72 bp, Homo sapiens
ggctagctgcgcctgcgggtgcccaaattggtgtccgggccatcctcaccgcagtgactcctccgcagcgcc

SEQ ID NO: 8155 - DNA, 72 bp, Homo sapiens
ccttttcctaatttgcacgaaggtgctacattggccggcagctgcctttggaatcatcctgcatgtttgtta

SEQ ID NO: 8156 - DNA, 72 bp, Homo sapiens
ctccgagcctgcaatgtgtcaacagccagcccacccgggctcagctcccagccgcctgagtcagccctgact

SEQ ID NO: 8157 - DNA, 72 bp, Homo sapiens
gcagcctttgctagagggttgccccgatctcctgacgcttggcctgagagattctatagtgcccagagataa

SEQ ID NO: 8158 - DNA, 72 bp, Homo sapiens
catgacggggagccgggaagcgctggtcgtccgaacggggcgggagcctggacaacaggggtacgaggaccc

SEQ ID NO: 8159 - DNA, 72 bp, Homo sapiens
tggacgaaaatgggggggaaaaaagggacaaagctcgagtctcctgaattttgtgcactgctactcggtgga

SEQ ID NO: 8160 - DNA, 72 bp, Homo sapiens
cgggagcagagagggaaaggaagtgtgtggggaggcggttggtagggtaaagccagacagctttggagagag

SEQ ID NO: 8161 - DNA, 72 bp, Homo sapiens
gaacttactgggggaactcaccaccaatatttcaacgtaagttctttctattttccacaagtgtcagccagc

SEQ ID NO: 8162 - DNA, 72 bp, Homo sapiens
tgaccctgcctgacagtgtcagctgtcctccgcagcgcgccccctccactgcaaccttctaagagccctggc

SEQ ID NO: 8163 - DNA, 72 bp, Homo sapiens
caggttgtccacacaatggcgctattttgggattccggcttctctgcctgtgacctgctgaaaccattcatg

SEQ ID NO: 8164 - DNA, 72 bp, Homo sapiens
taggcagacgaagagtgtgttggggcaaaggggctcggttggaggcatttcccataagactgagccctctca

SEQ ID NO: 8165 - DNA, 72 bp, Homo sapiens
tctttgtagattttgtctgtgcctctgcacggcctcgtagtatcccttggtggaattgaaccacatatgttt

SEQ ID NO: 8166 - DNA, 72 bp, Homo sapiens
ccaactatgaaaccaaatgcccagacttcttgctacgtgagataattaacgtttctgctgcttaatctcctt

SEQ ID NO: 8167 - DNA, 72 bp, Homo sapiens
ccatgctgtgggtgtgtcagcacttcctcctctttcgcaaccgagtggcgttcccgtgtgaagaggccaagc

SEQ ID NO: 8168 - DNA, 72 bp, Homo sapiens
tctgccccgccgcccattgtctgagatgtggggagcgcctctgccccgccgccccatctgggatgtgaggag

SEQ ID NO: 8169 - DNA, 72 bp, Homo sapiens
aaccagcatccaccagagaaccacgtgccccacagcggcgataactggcatccaccacagaacaaagtgtcc

SEQ ID NO: 8170 - DNA, 72 bp, Homo sapiens
acatcttatgaacacaaacagaagacgcacattgccgtccctggcctcctgcaatagatcactgtcagtttt

SEQ ID NO: 8171 - DNA, 72 bp, Homo sapiens
tcccttccctgacctgccccaggcggacgcggtgacgtgtgtttgcctcgaggctggaatacatggggatca

SEQ ID NO: 8172 - DNA, 72 bp, Homo sapiens
catccatgagaatcaatttcctcatctgccaagtacggatcctaactcaagttcctctaagccttaaaactg

SEQ ID NO: 8173 - DNA, 72 bp, Homo sapiens
tttaaagtataaaattcagtggcattaagtgctttcgcagtgttgtgcaaccatcaccactatcaaggtcca

SEQ ID NO: 8174 - DNA, 72 bp, Homo sapiens
cgcgcaagagccctgtgcatatggactccgattgacgccatcagattcgcccacaagccctgtgcgtatggg

SEQ ID NO: 8175 - DNA, 72 bp, Homo sapiens
gtgttgtgacccttcagacttcttcagctccactccgctgatagaggctgtgccttctcagggcgtgctctt

SEQ ID NO: 8176 - DNA, 72 bp, Homo sapiens
aaatgcatggttggcgaaggaataaaagcctgtatcgttggcacctcagcttacggaagttgtggggagttt

SEQ ID NO: 8177 - DNA, 72 bp, Homo sapiens
cgggcacctcttttgctttcccgagtttttatcttcgtaagggggaggggaaataagggaaaagaggaaatc

SEQ ID NO: 8178 - DNA, 72 bp, Homo sapiens
ccagaagaccttttagaaatcagcctgaagagcatcgcagatcctacaagagctgggaaagagatgtctggc

SEQ ID NO: 8179 - DNA, 72 bp, Homo sapiens
ctcccctcctaagacatacatacctactgaggtcacgctgatatattctcgttcatattattccacatagct

SEQ ID NO: 8180 - DNA, 72 bp, Homo sapiens
ctatttaaactaaattttaatgctttcagggaccacgtatactcttcagttcccttagcacttgagttccaa

SEQ ID NO: 8181 - DNA, 72 bp, Homo sapiens
gggtaaacatggcgaccgcggcgcccatttgcacacgctacacaaatgcatcgcattcccggttgtttgcag

SEQ ID NO: 8182 - DNA, 72 bp, Homo sapiens
ctgactcatccttgtccacttgacctgacaaggctcgaatgccttcaagaaaccttccctgggccgggcgcg

SEQ ID NO: 8183 - DNA, 72 bp, Homo sapiens
caaattaggaatcctaagaaagactgactgatagccgagtagagcagtctgaaggtagataaacgtgaaccc

SEQ ID NO: 8184 - DNA, 72 bp, Homo sapiens
ctgacaaagagacctgtcccaggagtgtcctccaccgagccggtcagctgtgggtggttttcctgttacgac

SEQ ID NO: 8185 - DNA, 72 bp, Homo sapiens
aatgacccccaaaagttagtgacttaaaataattccgtgatttctgtaggtcaggaatttaggaagagcttg

SEQ ID NO: 8186 - DNA, 72 bp, Homo sapiens
gaggtccctttcacactgtcagtcgcagccgtggccgcctctgtggaggtagatgtgggacagagctcctcg

SEQ ID NO: 8187 - DNA, 72 bp, Homo sapiens
tatcaaaaagtctatgttacagggtggatattctccgggctcaaaactattcattgctttctttttttttga

SEQ ID NO: 8188 - DNA, 72 bp, Homo sapiens
cccggtaggcccgcttcagaccccggggaaggcagcggcaggactccaggttgaggtagagcaggcccgggc

SEQ ID NO: 8189 - DNA, 72 bp, Homo sapiens
atcccaagagagcaactttgtcgcctcagaaaacacgccaacttccctcctgctctttccttggtcaactca

SEQ ID NO: 8190 - DNA, 72 bp, Homo sapiens
gcgaggggcgggaaggggctgtgggaggaaggggtcgcagcctaccacctgcagccctcgactggggcccag

SEQ ID NO: 8191 - DNA, 72 bp, Homo sapiens
tacgctgtgccaactaccctgtctggtacagaccacggctgggtaagcacccttaaaagcaacagaaatgac

SEQ ID NO: 8192 - DNA, 72 bp, Homo sapiens
ataaagcctcaggcgcccgtcattgctgctgcctgcgtgtgctcgctcaccgcgacggcggcgggctggagg

SEQ ID NO: 8193 - DNA, 72 bp, Homo sapiens
ttcctggacagggaagaaggatgccatcagctttgcggcttcgggttcctagcaagaaagtgcaaaaaccgt

SEQ ID NO: 8194 - DNA, 72 bp, Homo sapiens
ctccactgagctggaggcagttatcctgtcccccacgtcacattcctactcccgtttcccatgcctggaccc

SEQ ID NO: 8195 - DNA, 72 bp, Homo sapiens
tgagaggcaggggtctatggtggcaggaagcttggcgtgctagagggttgtggttgggctgctggggcccgg

SEQ ID NO: 8196 - DNA, 72 bp, Homo sapiens
aaaagcatacctgttggtttcttagacgtctacaccggcccatagcctttgtctccgccaccatggcctgag

SEQ ID NO: 8197 - DNA, 72 bp, Homo sapiens
cagctccctctttcctgcataggttcctgccagagcggacggtggaaacccctccccacaccgccgtgggct

SEQ ID NO: 8198 - DNA, 72 bp, Homo sapiens
gttatcgactacacagaagagtgaataaaacccaacgcctatcaaccaccaaacgtgactctgcttgcataa

SEQ ID NO: 8199 - DNA, 72 bp, Homo sapiens
cagcacagaacagccctccaggcgggcatactgcccgcttctatgctgtcaactctttagggagagagctca

SEQ ID NO: 8200 - DNA, 72 bp, Homo sapiens
gaggacagcgcctttaggtctcctgccagaatttccggctcaaggcagggccgaacacaagatgtggtcatt

SEQ ID NO: 8201 - DNA, 72 bp, Homo sapiens
ttggaggttccccgatgcagccctcaagatgcatccgcactccacacctaggaattgcccgcgcccatagag

SEQ ID NO: 8202 - DNA, 72 bp, Homo sapiens
tgactgatattagttcagagtatactttcattgtacgggaaaagcttcagttacaaaactggaagttaccaa

SEQ ID NO: 8203 - DNA, 72 bp, Homo sapiens
gaaggctgcgtgggtcccacatggcacagggcggccgctcgccttgtcctgagaagaccacggtctgcagag

SEQ ID NO: 8204 - DNA, 72 bp, Homo sapiens
atttggttttcccatccatgtttacactgtcatcccggtctctgcagaatcgagcatttgtaagtggatttt

SEQ ID NO: 8205 - DNA, 72 bp, Homo sapiens
tcctgcacaggcccacgtgctcgcgccaacccctacgccccagcgcgccttctccacccacgcacgggcctc

SEQ ID NO: 8206 - DNA, 72 bp, Homo sapiens
tacacactacactgccccttctccccccatcaaaacgctcagagacgttgtgatgatgcgactgaggattat

SEQ ID NO: 8207 - DNA, 72 bp, Homo sapiens
gcttcgcggttgccgcttccttgccagcgctgaggcggtttccgaagtgggtgggagcccaggtatcccctg

SEQ ID NO: 8208 - DNA, 72 bp, Homo sapiens
atagctctgttagagaaggaaggaaaggaacatgccggtatgtcaagagcagccaagcacatctgtttgcct

SEQ ID NO: 8209 - DNA, 72 bp, Homo sapiens
tgtaagactgatattatcaatccccattttaagtacgtggaacaaaagaagaaagaggcaaacaacatgctc

SEQ ID NO: 8210 - DNA, 72 bp, Homo sapiens
cgggacgtccaaggtagcaccaggcccctcatgcccgcaccccctcctcatggtcacctctgttcctgcagg

SEQ ID NO: 8211 - DNA, 72 bp, Homo sapiens
tgttcctggggggagactgcttcttcctccctaaccgtgaaccgctgtatattttccaattttgtgattttc

SEQ ID NO: 8212 - DNA, 72 bp, Homo sapiens
ttgcctcttgccgcatgtgattcaccagcaggagacgcatgcaccctgtggaaagggaagctgggcatcaca

SEQ ID NO: 8213 - DNA, 72 bp, Homo sapiens
atggttgagttgctgttatgtcctttctcaggagacgattgcctcgagctggagagttccatggctgagagt

SEQ ID NO: 8214 - DNA, 72 bp, Homo sapiens
agcccctgtttaaattaatatggctcttgatctcacgttgctcagctgttgccttcttagtcagatggggaa

SEQ ID NO: 8215 - DNA, 72 bp, Homo sapiens
accgatttaagttttagagtcccaggagttctgggcgagctgcagcctaggggcctggaaggccaggaagac

SEQ ID NO: 8216 - DNA, 72 bp, Homo sapiens
gccccctgctctggctggtcaaacggaaccaagtccgtcttcctgagaggtttggtccccttcaaccagcta

SEQ ID NO: 8217 - DNA, 72 bp, Homo sapiens
gttaccctaacagaaagaaatctgggtaatgaccacggggccagccctttcacttctctccttcctctgacc

SEQ ID NO: 8218 - DNA, 72 bp, Homo sapiens
aggtgggtaagaatccccagacggaagtccagagacgtctgctaagtcacagagtgttggcaatggagagac

SEQ ID NO: 8219 - DNA, 72 bp, Homo sapiens
cctccgtttcctcttctagcacataggcatcaccacgtttccctcacagcttcgcacgtgagatcacaatcg

SEQ ID NO: 8220 - DNA, 72 bp, Homo sapiens
ttccacaaacaaggcatacagggttcccaatgcctcgattcaaatatgaatcagcacaaagcattagttctc

SEQ ID NO: 8221 - DNA, 72 bp, Homo sapiens
cagctccccttcctgtctcccctcagtgtgagcaccgggaactcttcatccgccacatccagggcctcagtc

SEQ ID NO: 8222 - DNA, 72 bp, Homo sapiens
aaatgggtcctcccactttcccttttctacttgctcgctcttctttccccaggaaactttgcaagaaaggca

SEQ ID NO: 8223 - DNA, 72 bp, Homo sapiens
agtccaagacagaacaaggcacccgacgggtagaacgcaggggcatcccgggcacagcccccaaagccacct

SEQ ID NO: 8224 - DNA, 72 bp, Homo sapiens
tgaacacaatatttgtgtttttattatttatgccacgtcagtggggcaagaaatctggagtgagtgaagaaa

SEQ ID NO: 8225 - DNA, 72 bp, Homo sapiens
gccttacccacgagaagtcgaggcgtgttccagggcgcagttccaggaggctgggcaggcctgcaagttttg

SEQ ID NO: 8226 - DNA, 72 bp, Homo sapiens
gggaaatgaaatttgcggtgaaaaggtcaggaccacgatcctagggcacgctgggaaatgtagcccacaggg

SEQ ID NO: 8227 - DNA, 72 bp, Homo sapiens
gcagcagggagctgggagcccctgagggtctgaagcggggaaggagagacagtctgctcttacccagtcctt

SEQ ID NO: 8228 - DNA, 72 bp, Homo sapiens
aggggggagctcactccaaacagctagtgcactggcgtgtgaaagcccctcaattagcactaatgatgcaat

SEQ ID NO: 8229 - DNA, 72 bp, Homo sapiens
tccatgtggaaggtaaatgccgcaggagccccacgcgtggccctggagtggcctctctgccctagcggggca

SEQ ID NO: 8230 - DNA, 72 bp, Homo sapiens
aaaaaaaaaggcacgcacaatgctatcagttggctcggcttcctaaaagcactgcttaagtgctggcaataa

SEQ ID NO: 8231 - DNA, 72 bp, Homo sapiens
gcctccccaccgggctccgagggacgcagcggcctcgccaccgcattaggccgaatccggtgccttctagaa

SEQ ID NO: 8232 - DNA, 72 bp, Homo sapiens
tctgccaggcacagagggttgagtcattctgcaggcgtcagagctgttagcaacagctctgctgatctgtat

SEQ ID NO: 8233 - DNA, 72 bp, Homo sapiens
actacacagagggtttgccttcatcctgtaggaagcgaggggccaggggagggtttcaggcggtaaacagag

SEQ ID NO: 8234 - DNA, 72 bp, Homo sapiens
caaatgtcacatgcaggatgtttcgaaatgcattacgatccagtccaacaaccagaccttgcctctctactc

SEQ ID NO: 8235 - DNA, 72 bp, Homo sapiens
tctcaggtccctgaagtcctgtcctctcccggagccgacgtgttctcagctcctgggccgcagctcctggag

SEQ ID NO: 8236 - DNA, 72 bp, Homo sapiens
catgggaacgatgccgtctgctcgtctgcctgagacgctttctactccactccgagagtaggaggtcagccg

SEQ ID NO: 8237 - DNA, 72 bp, Homo sapiens
tgtctcggcggctcacttaactcaaaacaaatgctcgctctgccggctccgcgcccgcctctcccggctccc

SEQ ID NO: 8238 - DNA, 72 bp, Homo sapiens
gggtgagggctgaagtcagagatgagatggaatgacgccagggaaaagggtcccatgacaggcggctagatg

SEQ ID NO: 8239 - DNA, 72 bp, Homo sapiens
actcatctctgaggtttgagagtaggcctgaaaaccgggaagggggccccttcttgtctggagatgataatg

SEQ ID NO: 8240 - DNA, 72 bp, Homo sapiens
gacaatttgccccaaatagatagatttgtcagaagcgaccttcgggaaggaagcaaaaagccaccggcccga

SEQ ID NO: 8241 - DNA, 72 bp, Homo sapiens
agatgctcatttgcattcatttgcatactgttccccgcccctctgggcccagctgcctctggccctccagcc

SEQ ID NO: 8242 - DNA, 72 bp, Homo sapiens
ttagttcagcttcccttctgccttctaagccgtctcgctgacttgtgtctacctccaccgcaaattccagct

SEQ ID NO: 8243 - DNA, 72 bp, Homo sapiens
ccaagtcctcctggcagctactctacagctgaaaacgggagaaaagagagcgttagaaagcggtcatctgtc

SEQ ID NO: 8244 - DNA, 72 bp, Homo sapiens
ctccaccctcagaggcttaggaaagggaagtgtgacgagtcagggcccctgggctggtgtcttttccaatac

SEQ ID NO: 8245 - DNA, 72 bp, Homo sapiens
tttttttttttttttgagacggagtcatactctgtcgcccagcctggtgtgtgtgcagtggcgcaatcccgg

SEQ ID NO: 8246 - DNA, 72 bp, Homo sapiens
agtgaaacagacaaagattcacgttcctctccggccgcctatggggagcagtttccaaactcccatcccgga

SEQ ID NO: 8247 - DNA, 72 bp, Homo sapiens
tctctctagagtgtcttcacatagatattccctgacgtgagtttttttttttttttttttttttttttgaga

SEQ ID NO: 8248 - DNA, 72 bp, Homo sapiens
ccgacttgtgtttaaacctaggctttgacaccggtcgatcgttcagccacatgcaggttacctaagcatgtc

SEQ ID NO: 8249 - DNA, 72 bp, Homo sapiens
cctgcccttcccagaacctgagaccgtctggggggcggaagccaaatgaacccctattgggcacctctgtga

SEQ ID NO: 8250 - DNA, 72 bp, Homo sapiens
cctccaccagggggcccccctgccccggcccctctcgggccattgcatcctgtccctctggttgcttgcttg

SEQ ID NO: 8251 - DNA, 72 bp, Homo sapiens
tcccccaggtgtgggacatgcagtgatttaggtgccgaagtggatttccaacaacatgccaagaaagtattc

SEQ ID NO: 8252 - DNA, 72 bp, Homo sapiens
gttgaattgtataaaatatgaccagggaactacaccgtattaggtgttacttcatgaaattatgtgttatag

SEQ ID NO: 8253 - DNA, 72 bp, Homo sapiens
cagttaggcccggctttggctgctgatgcaggggccgaatgacgctatttctgcagcagccggccgcaggcg

SEQ ID NO: 8254 - DNA, 72 bp, Homo sapiens
cctagactgtgtcctaactgctcacaagggttcagcggcatgcaaacagtctttaattggttttcttcaaag

SEQ ID NO: 8255 - DNA, 72 bp, Homo sapiens
agcacctatagccataactggcacctgggggcctgcgttgctggcagtttcccttacatttctttggagtct

SEQ ID NO: 8256 - DNA, 72 bp, Homo sapiens
acacagcaggctgtgtggagaaattgtgcaccagacggggcagggggaaagggtgaggcagttcagctgccc

SEQ ID NO: 8257 - DNA, 72 bp, Homo sapiens
tgtcttgagcagagctgcttgcttctgaatgctcacgataatcaatagcagatgtgtggtaagcactggaaa

SEQ ID NO: 8258 - DNA, 72 bp, Homo sapiens
aggaaggtcccagagaaactccccaggggggaagccgaggccgtccagagagatccagggtacacacagtga

SEQ ID NO: 8259 - DNA, 72 bp, Homo sapiens
gtgtctgtgtcacttccttcagaaatcgacgtggccgtcctcggaagtacccagtgagcgctcccatggctc

SEQ ID NO: 8260 - DNA, 72 bp, Homo sapiens
tcccgctcactgagattcccgctcactgggattcccgctcactgggcttggtgtcgcggaaaaaacgaaggc

SEQ ID NO: 8261 - DNA, 72 bp, Homo sapiens
cctgtattttgcactgccagaattctgatagctgccgtgaagcagggctgtggcaagtggccaagtgtgata

SEQ ID NO: 8262 - DNA, 72 bp, Homo sapiens
gggcacccaggaggagtcagtggaaacacatgtaccgtggaaacagatcaggtcttgcgctgaaattcggat

SEQ ID NO: 8263 - DNA, 72 bp, Homo sapiens
cgtgcgctagtgcccgcacccggtgtgtagaagggcgcgagcgttggcgtgagagccggtgtggcctggaag

SEQ ID NO: 8264 - DNA, 72 bp, Homo sapiens
gaaggccacccaggcagcctgcagctagagctcggcgctgagagagcacaggagagtcagacacctccattc

SEQ ID NO: 8265 - DNA, 72 bp, Homo sapiens
cgttctcagtgtccgtgaggccggggcaggagtggcgggggtcgccccgaagtgggtgggaatgagcggccc

SEQ ID NO: 8266 - DNA, 72 bp, Homo sapiens
ggggtgaggagaggcccttgactgagatcgtgtggcgaggtgggccaagcctaaggaaaggggaagatgcac

SEQ ID NO: 8267 - DNA, 72 bp, Homo sapiens
cagagaggggaaatgactggcccaaggggacaagacgcatcttaagatgtcaagtcctggacccttccctgc

SEQ ID NO: 8268 - DNA, 72 bp, Homo sapiens
aacttgatagaattgtgaaagagtttcgttaagtgcgaagaatatgtagagtgatgtaataatatttttggc

SEQ ID NO: 8269 - DNA, 72 bp, Homo sapiens
gccctccctccccatcccacccccctccttcccctcgatccagccctcatgaccctgaccctggccgcggct

SEQ ID NO: 8270 - DNA, 72 bp, Homo sapiens
cggcggggccgcgcgctgggcgcgacgggagcgcgcgcccgcctggccaccccagcccaggctcccgagccc

SEQ ID NO: 8271 - DNA, 72 bp, Homo sapiens
gaggtgtgactggatgctggtggagggatgcatggcggggaagctgagtcagatcctgaaatcctccaagca

SEQ ID NO: 8272 - DNA, 72 bp, Homo sapiens
ctggggtctttggggcccagaagaaacactggccccggggagttcagtcatcagggacttaggatgtggggg

SEQ ID NO: 8273 - DNA, 72 bp, Homo sapiens
tctgcaatccacctgtctgctatcccatcaaaacccgaggcttactccctgcgcgtcagcagtagccgaact

SEQ ID NO: 8274 - DNA, 72 bp, Homo sapiens
agcacttttgagctcagcatgaagggaatccacagcgcagacttcatttccctgtgacaggatttcccaaat

SEQ ID NO: 8275 - DNA, 72 bp, Homo sapiens
gtgtggaaacatctaccatcatgggctaggcacaacgtaagggactacatgtttctgaggcagaagccacca

SEQ ID NO: 8276 - DNA, 72 bp, Homo sapiens
cctttctccagcttctgctctgccccaagagtggtcgccttcgtggcagggcacgactctctcccagctcgg

SEQ ID NO: 8277 - DNA, 72 bp, Homo sapiens
ttccaaggagggcggccaggctgcagccagagggacggaggcatgagctgagtgagaactcccagctcaggg

SEQ ID NO: 8278 - DNA, 72 bp, Homo sapiens
tcctgatctataaagcaagattcagtggcaccaaacggtgctagaagcattctctggttcacagcacacttc

SEQ ID NO: 8279 - DNA, 72 bp, Homo sapiens
tggcgtagaagtcgtggaggacctctctccaagggcgcagaggagtccaacacccaacaaccttgctatggc

SEQ ID NO: 8280 - DNA, 72 bp, Homo sapiens
gctgactacttgctcagcacattgcaacatcagggcgctcttgtcagcctggattatgtagggcctgttatt

SEQ ID NO: 8281 - DNA, 72 bp, Homo sapiens
agcggtcgggggaccgggccaggtgactaagtttccgcggcgccttctccccggccactgcttgagccgctg

SEQ ID NO: 8282 - DNA, 72 bp, Homo sapiens
ctgtgaggcatgacaagcttcccgttcttcctccacgtgatagtcacttctgctggatagaagccccacaca

SEQ ID NO: 8283 - DNA, 72 bp, Homo sapiens
caagtcctgtgtcactgtggctaacaatctggtcacgtgctcttgttcagttgagctgtaaattcctgtgtg

SEQ ID NO: 8284 - DNA, 72 bp, Homo sapiens
gttcagcttggctgggcccgctgtgaggggcttcgcgctacgccctgcggtgtcccgagggctgaggtctcc

SEQ ID NO: 8285 - DNA, 72 bp, Homo sapiens
cccagctgacagagctgggcttggcatgtgcagagcgaccctgagctggtgcagtggaagaaggagctgcgc

SEQ ID NO: 8286 - DNA, 72 bp, Homo sapiens
cagctgctggcccagatgctaagccccacactgtccgtggccggcggtgccggcctgctggccgctccaagt

SEQ ID NO: 8287 - DNA, 72 bp, Homo sapiens
gggaattcccacatacacatcacttgttaggaaggcgagaaaggcaagccaagctgatgagtgaatgaggaa

SEQ ID NO: 8288 - DNA, 72 bp, Homo sapiens
accatccctcctgcccaagtgtttggctgagtccacgcttggctgaggacagagccctgaaatatctcccag

SEQ ID NO: 8289 - DNA, 72 bp, Homo sapiens
ctttgccgaggtgattaggatgcgtcctccgagggcgcacggctttaacccgagttgccagcgcttttcggg

SEQ ID NO: 8290 - DNA, 72 bp, Homo sapiens
tgtaaatgaccctctatgagccacgccgctttgaacgcaacccactggagattctcggttctcctgtatcga

SEQ ID NO: 8291 - DNA, 72 bp, Homo sapiens
ttatggttccttttttaaagtagttgcataaacagcggccagataagcatgtttgaagtagaaattcagggg

SEQ ID NO: 8292 - DNA, 72 bp, Homo sapiens
ctccctcgaagataatccgcctgacaggtcaggcccggcgagctggaaagcctggcccagagcacccaaaca

SEQ ID NO: 8293 - DNA, 72 bp, Homo sapiens
gtgtggtggcgcccagggtgggggctcccaagaggcgtctccctggaggacagccagttgctcagcctgcct

SEQ ID NO: 8294 - DNA, 72 bp, Homo sapiens
aggttttgagcaaacacagatgaatgaccgtgttacgggaagtgaagccagggccctggtgtgggctgagca

SEQ ID NO: 8295 - DNA, 72 bp, Homo sapiens
atgcattgtgtggtgacgcaaaaggactgatgatacgtttctggtcagaaagtaggaaatcagttgaaggtt

SEQ ID NO: 8296 - DNA, 72 bp, Homo sapiens
gtgggacttcagttccttatcagtaaaacagagcccgtggctttccatgaatgtggggttgacttaccagaa

SEQ ID NO: 8297 - DNA, 72 bp, Homo sapiens
aggtacctgctctgcgctctcctccggcggcgggacgtgcaagtcctggatgacctcgtagacgttctctga

SEQ ID NO: 8298 - DNA, 72 bp, Homo sapiens
tgccgggggaggcagtgcctttccctagcaatgcacgggagaactgaacaggaaacactttacctcactgcc

SEQ ID NO: 8299 - DNA, 72 bp, Homo sapiens
aggatgggcactgcagatgtgtgtctgcatgccagcggacccggcaccctccttcctccctgccaaccgcct

SEQ ID NO: 8300 - DNA, 72 bp, Homo sapiens
aacttggtgccgtgactaatcttccttctctgtctcgctaccttctagtcactagaaacatataagtgttgg

SEQ ID NO: 8301 - DNA, 72 bp, Homo sapiens
tagtgatgccaagtcaggcaaacacattccttaagcgttccacctaactcccttcttcctggaagttacatg

SEQ ID NO: 8302 - DNA, 72 bp, Homo sapiens
gctgggagcaggagaggcaccttattactgttccacgggtgccttactgtgagattaggtgagatcttctta

SEQ ID NO: 8303 - DNA, 72 bp, Homo sapiens
ccagcgtctctgttttcaggttttggaggcgagagcgccagaaagtctgaggcatgatacaaaagccctgtt

SEQ ID NO: 8304 - DNA, 72 bp, Homo sapiens
gcatacgctgaggagtttggcaacgagacgtggggcgtaacaaaggtgaggcctggtcctggtcctgatgtc

SEQ ID NO: 8305 - DNA, 72 bp, Homo sapiens
cctcctacacaagagcatccaggtgagaacctcctcgtccttctcctcctcccccctcctccccctcctccc

SEQ ID NO: 8306 - DNA, 72 bp, Homo sapiens
ccacttccacgtggctacctcacgcggacgccccacgtgcggcctgacccacaggaagtccagtcataatat

SEQ ID NO: 8307 - DNA, 72 bp, Homo sapiens
aacactccccacaacaggttctaacacccaaaaaacgtctccagtcattgctaaatgctccaggggcaggaa

SEQ ID NO: 8308 - DNA, 72 bp, Homo sapiens
gagccaggttgagacccatcttttcttagttttatcgatatctgtttacttaaccacaaagataactttttt

SEQ ID NO: 8309 - DNA, 72 bp, Homo sapiens
ccggcctcggcctcccaaagtgctgggtttacaggcgtgagccaccgcgcccggcagagaacctcttgaacc

SEQ ID NO: 8310 - DNA, 72 bp, Homo sapiens
cacctcatgggtaaactgaggcaagagagtagggacgaggggcattgcccagggttccaggataggaattgc

SEQ ID NO: 8311 - DNA, 72 bp, Homo sapiens
ccaagccctcctggaattctctgtttgagagtctgcggggggacagggagacaggaggcgggggagtcctag

SEQ ID NO: 8312 - DNA, 72 bp, Homo sapiens
tctcttcctccccctttcctgagctcccagctgctcgacctcttgcgtaactgtgagagagcgctgagtttt

SEQ ID NO: 8313 - DNA, 72 bp, Homo sapiens
ccttctcctcaatgctgactcactcaaactaagtccgcattgaactccctcctaaacttcttttaatctttt

SEQ ID NO: 8314 - DNA, 72 bp, Homo sapiens
aagactgtgcgcaggcagcacgtgctgaagccagacgaggacagcatgagagttcccctactcttcccccag

SEQ ID NO: 8315 - DNA, 72 bp, Homo sapiens
gaggattttggaagtttctagtctacagtaggcaccgtaggtttagagaaaggaagactcatgatgtgggca

SEQ ID NO: 8316 - DNA, 72 bp, Homo sapiens
aatatggccagtctgggtccagctggcagagcacacgggaggaggctgctctctcaccaggcaaactgagga

SEQ ID NO: 8317 - DNA, 72 bp, Homo sapiens
gaggctgccgtgaccggcaggtcaggacccagatgcgtggcggaggcttccccaaggtcagagtcaggactc

SEQ ID NO: 8318 - DNA, 72 bp, Homo sapiens
tgggtggtgctgagctggctggagggaagcaagggcgtcagaaaggaagactggcccagcacccgaccaggc

SEQ ID NO: 8319 - DNA, 72 bp, Homo sapiens
ggtctcatgatttaaggccctgtcaaggtcaataacgtagatttgttccagcagataaattatacctgaatg

SEQ ID NO: 8320 - DNA, 72 bp, Homo sapiens
cagctgcctgcccagtggccgaggctcttccccctcgcccagtcttgagctggaagtgattcctattggcca

SEQ ID NO: 8321 - DNA, 72 bp, Homo sapiens
tcatgtgtgggtttggtgagccagtatctttaatgcgacttttttcagcactggagttttacaaagcctggg

SEQ ID NO: 8322 - DNA, 72 bp, Homo sapiens
gccatggagaagaggcaggaaaggccgttgacaaacggggacactgaggctcgaacaccctgccctgtctag

SEQ ID NO: 8323 - DNA, 72 bp, Homo sapiens
tcctccttgagcatctcatagctggggttggggggcgggggagggcagccactgttggcaggaatgaagaag

SEQ ID NO: 8324 - DNA, 72 bp, Homo sapiens
ctgaagagccacgtcctaacagtgttccctctattcgtgaacagactatgcatgtgagcacacagttatgaa

SEQ ID NO: 8325 - DNA, 72 bp, Homo sapiens
tgtccgggctgctgagctgtggtgcaggcagagggcgcggaggcccgggccaggcagagccccacgcgtgtc

SEQ ID NO: 8326 - DNA, 72 bp, Homo sapiens
gggaaggaattacaactttgcagaaattccagtgtcgggcagtggctgtagatcacttctgatttgacagtc

SEQ ID NO: 8327 - DNA, 72 bp, Homo sapiens
gtgttcctttcccctttctggggcaaaagccactgcgggccatgtacccaaataaacctcttaatgcgtttg

SEQ ID NO: 8328 - DNA, 72 bp, Homo sapiens
ccagtgagacagcaaaataaaggtgtcttcaccgccggttaacatccacatttaccacacacgcagtctgta

SEQ ID NO: 8329 - DNA, 72 bp, Homo sapiens
cacactgcaggttttgtcaatgactcacttgtatacagaaccataagaagtatgtgtgcccaggagagctgg

SEQ ID NO: 8330 - DNA, 72 bp, Homo sapiens
ccggcccagcaggcgggaaggggcctggggaagcgcggcccagcactgctggggcagtttcccgtgcgccgg

SEQ ID NO: 8331 - DNA, 72 bp, Homo sapiens
attttctggtattgcttcctctggccaagttttgccgaggctcagcctgggtcagccttccctcttcttgcc

SEQ ID NO: 8332 - DNA, 72 bp, Homo sapiens
ttttttttcgttttggagacagggtcttgctctgtcgtccaggctggagtgcagtggtgtgatctcggctcg

SEQ ID NO: 8333 - DNA, 72 bp, Homo sapiens
ctccctcctgggaaatagcaaccatccatcacgaccggcagagcccatcacacccacaggcagagccatcaa

SEQ ID NO: 8334 - DNA, 72 bp, Homo sapiens
cttccccgggccccagccccgacctagaacccgcccgctgcctgccacgctgccactgccgcttcctctata

SEQ ID NO: 8335 - DNA, 72 bp, Homo sapiens
acctgctcgcgtgcacagttctgtggcattaaccacgttcaccgagttgtgcaaccatcaccaccgtcctct

SEQ ID NO: 8336 - DNA, 72 bp, Homo sapiens
tgctccccccattcattgcccagctacctctgctccgtgtacggctgaatcttttgcacaatgatgtcggaa

SEQ ID NO: 8337 - DNA, 72 bp, Homo sapiens
ggagacaggacaaagcagtggctcagctggggacacgcaccgtttgcaccagaagtcttcacgctcaagtag

SEQ ID NO: 8338 - DNA, 72 bp, Homo sapiens
cccaacctcggttcagtaaacccagggaccccatgcgtacctccagaagtgcagctgtgttctccaagccca

SEQ ID NO: 8339 - DNA, 72 bp, Homo sapiens
gttcctttcacaagagtcctgttgaacattaatgccgtgcagtgccagagttcaaggtggtgagtcactgct

SEQ ID NO: 8340 - DNA, 72 bp, Homo sapiens
tttgggcatcgcggtctggggttgggacgtgtaagcgcctgggagagcctagaccaggctccgggctgccaa

SEQ ID NO: 8341 - DNA, 72 bp, Homo sapiens
gaccaagcacagccaacgtcagctccgctccctgccgtctgagagctgaccacaggcagatgagatgcccac

SEQ ID NO: 8342 - DNA, 72 bp, Homo sapiens
ctgaaggagacagactgtgaaacagctgcctttagcggggttcagatgaaatctgaggaaaggagacaaaat

SEQ ID NO: 8343 - DNA, 72 bp, Homo sapiens
gtgtgttcttgatcgggaacgggaggcccaggacacgttttctgtggcagctcgaatgcagctgagggcgct

SEQ ID NO: 8344 - DNA, 72 bp, Homo sapiens
gtcggtgggctcctctaggcccagcttgggcctcccggcggcctctgcaggcccaaaacgtcccgaagttgg

SEQ ID NO: 8345 - DNA, 72 bp, Homo sapiens
tccagactgacaaatgactcagacacacaaacgcccggggctaagaggaaacacggcatggcccggaggttg

SEQ ID NO: 8346 - DNA, 72 bp, Homo sapiens
tgctgtacatgaagcggggcaggtactgggttgggcggtgtcctggcacagatgactgtgcaaagccacaga

SEQ ID NO: 8347 - DNA, 72 bp, Homo sapiens
aagcaggactatagcttcctccttttgggacctatcgctttgcactcctgcgataaagttcttggcacccat

SEQ ID NO: 8348 - DNA, 72 bp, Homo sapiens
atgttgttgatggcagagtcactgccttagagcctcgagtttattcaatgggataaaagttgcctggtaaat

SEQ ID NO: 8349 - DNA, 72 bp, Homo sapiens
ttgtatatcaacagaaatgggttaaaacaacaaagcgaggagtccctggttgggctcggaccaccagccttt

SEQ ID NO: 8350 - DNA, 72 bp, Homo sapiens
agactgaaccacaacagctaaaactaacagaaacccgaccttggttcttagtggcaaagaaccagaggactg

SEQ ID NO: 8351 - DNA, 72 bp, Homo sapiens
taaaacattcagatatctactgcccaacagtgaatcgtggagctttttaataaaagataaatgagtacctgt

SEQ ID NO: 8352 - DNA, 72 bp, Homo sapiens
cccgaattttctgcgcccatcaggggcttgcgctccgggatggtgcctttgaagaaagctgccacctccagg

SEQ ID NO: 8353 - DNA, 72 bp, Homo sapiens
aatctcaccctatgaatctaagaacaccaacccctcgccatcctaagtatcacagagccaggcaagcatggg

SEQ ID NO: 8354 - DNA, 72 bp, Homo sapiens
tctcctttctcagcctgttggaatcgaatccgttccggctcccacccaggcggtacctctgtctccactccc

SEQ ID NO: 8355 - DNA, 72 bp, Homo sapiens
tgagtcgagatggtgccactgcacctcagcccgggcgacagtgtgagactccgtctcaaaaacaaacaaaca

SEQ ID NO: 8356 - DNA, 72 bp, Homo sapiens
tctgccacagccctggcttgtggggacctggtggccgagagcctcctccacctacctccagagccacaggct

SEQ ID NO: 8357 - DNA, 72 bp, Homo sapiens
gggcaaattcccaagactgctcttcacgcagggagcgcgcggaggcccgcagggtgcccgcctggccgcaga

SEQ ID NO: 8358 - DNA, 72 bp, Homo sapiens
tgagaggtcatgatcgattgagcaagcagggggtacgtgactggggtctgcgtgcaccgggtaatcagaacg

SEQ ID NO: 8359 - DNA, 72 bp, Homo sapiens
attaatgccaaaaccacaaaatcactaacctgatacgaaattccagaatgcggcaagaatattacaagctaa

SEQ ID NO: 8360 - DNA, 72 bp, Homo sapiens
tcagggatgccaaggggaagactttcccaagtcaccgtcttcttctctgccccttcaaatttgcgcattgat

SEQ ID NO: 8361 - DNA, 72 bp, Homo sapiens
aaatcctagcaaaagcacttcccagtgcccacctccgctcctgggctagttcccttttcctgctgaagagta

SEQ ID NO: 8362 - DNA, 72 bp, Homo sapiens
attatatacttttaaaaggagttacaatgcttcctcgtgtctggcaaacggccttacagcctcactgccctt

SEQ ID NO: 8363 - DNA, 72 bp, Homo sapiens
gggaagacccccctgagcaacgtgagaccaaggctcgtgagacctacactgccttgtaggtctctggggtct

SEQ ID NO: 8364 - DNA, 72 bp, Homo sapiens
catgatgttcctgcgttgtgtttacagcctccctgcgaggggttcgcacgcacaggcggacctcgttttgtt

SEQ ID NO: 8365 - DNA, 72 bp, Homo sapiens
gttgctgaggaactcgaacattccaaacctggaggcgggaggcgggtgagaggggctgccgcggccgagccc

SEQ ID NO: 8366 - DNA, 72 bp, Homo sapiens
gatttagacgtaaggccaggagtgagaagtgttaccggtggagggtgtccaggtccaagaattggacaaagc

SEQ ID NO: 8367 - DNA, 72 bp, Homo sapiens
gtcttcccacttgagggtgaccacactgttacaaccgaaaagagccctgtgcaaacttgtgaatgggaacct

SEQ ID NO: 8368 - DNA, 72 bp, Homo sapiens
tgataaggggagttcagtacacatcagtgcaggcccggccagggggtgatgatggcagttcctgggcagatc

SEQ ID NO: 8369 - DNA, 72 bp, Homo sapiens
tctgtttggcagccctcacaaactaatgtagtatccggtaaatatttgctgaagttgtttgtttccttttct

SEQ ID NO: 8370 - DNA, 72 bp, Homo sapiens
tctacagggggcccacataaaactttatactgctccgcaccaccccattccaacctccaacatgagttgccc

SEQ ID NO: 8371 - DNA, 72 bp, Homo sapiens
gtctgggaaaccggtaagatctctgtggtcttcctcgttcagaatttcgcttcctttctctcttcactccgg

SEQ ID NO: 8372 - DNA, 72 bp, Homo sapiens
ctttctctctttctctcccttttgtgaatgggccgcggtgtctttgttctgtagagaagcgcccgtgtcgct

SEQ ID NO: 8373 - DNA, 72 bp, Homo sapiens
accaaagaggccctgccaatcaaatgcctggaagccgtgatcctgggaatgtatccttcctcacctgaaggg

SEQ ID NO: 8374 - DNA, 72 bp, Homo sapiens
cctgggctgttgttgagggtaattcttgtgcgctccgcgggggcgggtccccatccgccgcttcaggcctgc

SEQ ID NO: 8375 - DNA, 72 bp, Homo sapiens
ttgagaaagtaaaagttggccttccccaacatccacggatgaatgctaaaattagtaggcagaacttgaagc

SEQ ID NO: 8376 - DNA, 72 bp, Homo sapiens
attttgcagctgtaaacagtcccagccctgcaaaccgaaagtttgttgctcttccctttaaaattactgtag

SEQ ID NO: 8377 - DNA, 72 bp, Homo sapiens
aagttcccttaaccatgttacagaggaggctatttcgaggaaactcaaagccacttcagaggaaggaagtgc

SEQ ID NO: 8378 - DNA, 72 bp, Homo sapiens
cccaaaatgaatgacctaacaatgcaggtttctatcgcagtgccacaagccactgttaccccgagcacattt

SEQ ID NO: 8379 - DNA, 72 bp, Homo sapiens
cctctctccgtaactcagccatcagcaggggcagacggcaggtggcctggttgctgcagctcccaggatcag

SEQ ID NO: 8380 - DNA, 72 bp, Homo sapiens
tccctacccctgtctacgtcggctccgccacttcgcggcttgagactaaaagagcatcccggcagggggcct

SEQ ID NO: 8381 - DNA, 72 bp, Homo sapiens
tgctgggccgtcgggagtgttgcctattaaccaggcggtgtcacctccaggatgcaggggataatggcaaaa

SEQ ID NO: 8382 - DNA, 72 bp, Homo sapiens
gtgagcagcatggtgatcgggaaggccacggacaccgatccgcaatcctcgccagaccctggagggcgcgtg

SEQ ID NO: 8383 - DNA, 72 bp, Homo sapiens
cagatgtcaccagccgaagccttctatgaacaaaccgggggaatttcacaatgctggaagcaaacaaatctc

SEQ ID NO: 8384 - DNA, 72 bp, Homo sapiens
atgactcctgaccatgattccttacactgggcctgcgtaagagagatgtgttaatataccacaatccaggca

SEQ ID NO: 8385 - DNA, 72 bp, Homo sapiens
cctctggttcaaagaccggacggagtgttgaggggcgtaggcccagtctttccaaactcctggagtgggcgg

SEQ ID NO: 8386 - DNA, 72 bp, Homo sapiens
agggtgaccccagcttccccatgtgggggatgcgccggtggtgcaaggccaccaccctgtgccctgtctctg

SEQ ID NO: 8387 - DNA, 72 bp, Homo sapiens
gtcactacctccagctcttggtgacagcaggacagcgcggtcctctccactgccctccactgtctctgctgt

SEQ ID NO: 8388 - DNA, 72 bp, Homo sapiens
acacacacacacacacacacacgcacgcacacacacggtgcttcaccccagccaggccagaccaaaagagac

SEQ ID NO: 8389 - DNA, 72 bp, Homo sapiens
tggctgaaggggtttggcttttttaagtgcgcagacgtccagccttcactggcatatacgggtaccccagcc

SEQ ID NO: 8390 - DNA, 72 bp, Homo sapiens
aagacctccgaacttccctgctgaaggcacgtttacgtctttggactctggtgtaccagggcctgaacaagc

SEQ ID NO: 8391 - DNA, 72 bp, Homo sapiens
gccattgtcagcctggacccagggaagtccctggacggggttgctggacttgggaatgatgcagggaggaag

SEQ ID NO: 8392 - DNA, 72 bp, Homo sapiens
gggtggttggggcacagtggggttttatacattttcgggaggcataagacatcaatcaaatacatgtaagat

SEQ ID NO: 8393 - DNA, 72 bp, Homo sapiens
ggtcttagggatcccaaggaagagaagtgagtgtgcgaccgagctcagggcccaggctggttcatgctattc

SEQ ID NO: 8394 - DNA, 72 bp, Homo sapiens
ctgacggcaaatgttttccattatgttccttctcccgagccccacccccatcccagacagtcagatgatctt

SEQ ID NO: 8395 - DNA, 72 bp, Homo sapiens
acactggacagtgacaggtcgtggtgggtgttcagcgtcctatgaacacgagttaaggaagagcctccagtc

SEQ ID NO: 8396 - DNA, 72 bp, Homo sapiens
cgtggggaaggcgcaccgcactcccctccccgccccgcctgcgccccgcttctgcagtctgggagaggtgtc

SEQ ID NO: 8397 - DNA, 72 bp, Homo sapiens
tggttgagattaaggatgattgtgaaacctcgacacgctggttgagattaaggatgattgtgaaacatcgac

SEQ ID NO: 8398 - DNA, 72 bp, Homo sapiens
ctcacaccaccctgcatccccagagcctccctggacgctgtttgcaaggtcctcaccgcctggaagtccagg

SEQ ID NO: 8399 - DNA, 72 bp, Homo sapiens
aatattccaaccgcagggtgaagatggacaccaaacggccgtgcatcagttcacattgcatttttctgtcaa

SEQ ID NO: 8400 - DNA, 72 bp, Homo sapiens
cagagggaggcaccttgaggggcgcccacagggaacgtcatagccagagctttgtcagaattgctttttccc

SEQ ID NO: 8401 - DNA, 72 bp, Homo sapiens
aacggtcgcgacccaggtggagcgactgcgtgtgccgaaaaagagcttatttgctgattggcttctgccgct

SEQ ID NO: 8402 - DNA, 72 bp, Homo sapiens
gcttaccaaggacatgacatttcaaacagctttgacgcataagtaggagtttatgtggtagagatgtggaaa

SEQ ID NO: 8403 - DNA, 72 bp, Homo sapiens
ccgccaagccgtggctcctgtcgtcctgacatagacgccgccattttaacgctgacctccaggggctggtgg

SEQ ID NO: 8404 - DNA, 72 bp, Homo sapiens
ctcttaggcaaacctatagctatgtaacatggcaacggaatgacactaactgtctcattctccttgggagtg

SEQ ID NO: 8405 - DNA, 72 bp, Homo sapiens
ctgagcgatgatgcgaacgtgcgtcctactctccgcggtgctctggtgcctcacaggaggtggggctccctc

SEQ ID NO: 8406 - DNA, 72 bp, Homo sapiens
acagctcccccaaatgagtagggcctggacctagccgtggcctgtgacctcaggaaggagttctcactttcc

SEQ ID NO: 8407 - DNA, 72 bp, Homo sapiens
cttaggaccaacatcgcacctgggggaggcaaccccgcgaggcggggactgagttgcagcccctcttccccg

SEQ ID NO: 8408 - DNA, 72 bp, Homo sapiens
ccgcggctcctgcacttccacttccttcagtacgtcggaaactactttgcagacttcccggatagttttggc

SEQ ID NO: 8409 - DNA, 72 bp, Homo sapiens
gacctccccaggatcagagctctgggcctgatacacggccggggttcctacgggtttgtgagtgggggtgga

SEQ ID NO: 8410 - DNA, 72 bp, Homo sapiens
cccggactcgcccaccacgggcccccttccagagccgggaggcaggccaagggaggccccttattgccaaga

SEQ ID NO: 8411 - DNA, 72 bp, Homo sapiens
aaccctcagtccttcctgccttgagccagaggccacgggctccatctgctgagagcttgtagagacacacat

SEQ ID NO: 8412 - DNA, 72 bp, Homo sapiens
tgctccatatcattgccccctccttgacttcctttcgcaatttatcacgcgcatatgtatgtgtatgcataa

SEQ ID NO: 8413 - DNA, 72 bp, Homo sapiens
catcagaagagaggtggagggaattttgacaaccacggaagttaggtggagcaacgtttgcaaaacatcagg

SEQ ID NO: 8414 - DNA, 72 bp, Homo sapiens
cacagatgtgtctgggagcagctgggaggctgagacggcaggcaggcctttccttcttataactctgggctg

SEQ ID NO: 8415 - DNA, 72 bp, Homo sapiens
agaactccgcgtttctccctgggaatgtagagatgcgttagtgccgggagagggcgttgcgagatttccaga

SEQ ID NO: 8416 - DNA, 72 bp, Homo sapiens
gctagaacaaaagagacttgttccaaatgagatgacgcatgtgaagcgcttacccagtgctcggcaagggga

SEQ ID NO: 8417 - DNA, 72 bp, Homo sapiens
tctgacaggtgtttctgctactatgtgtttgctaacgtattggtggtagtcacgcggaaaagtgtgccatgc

SEQ ID NO: 8418 - DNA, 72 bp, Homo sapiens
tgttccctgaggttctagacctctagggtgttgtccggaaagaacagggccatgtggaagtcagcaaagaga

SEQ ID NO: 8419 - DNA, 72 bp, Homo sapiens
ctgaggagagcctggcagggccccacagtactgcccgggggtagtgaggccccgctggggagaatggcccaa

SEQ ID NO: 8420 - DNA, 72 bp, Homo sapiens
ttctgctgagaacattgggcacattgagtctagcacgcccatcttgtagatggggaaagggagatacagaac

SEQ ID NO: 8421 - DNA, 72 bp, Homo sapiens
gagccctggagactcagggcccgtctggtgcggcccgggctttgctccgcgctcgccccctgcagctgccgg

SEQ ID NO: 8422 - DNA, 72 bp, Homo sapiens
ggcgctgagtccctgctgctgcagcatccagccaccgacccagctcctgctgaccacgatgtcgggtaactc

SEQ ID NO: 8423 - DNA, 72 bp, Homo sapiens
ctaagaggaactgtgcctggctgagccaagagagacgaaggccatagagttcttcaaccttgcctgtgtgtt

SEQ ID NO: 8424 - DNA, 72 bp, Homo sapiens
tggagggaagaagcaagtgcaggcttgaggagccacgaaggctatcattattgcagaatggccatggctggg

SEQ ID NO: 8425 - DNA, 72 bp, Homo sapiens
cagctagctgtgccagacatttgtccctctggccacgtcttggggacagcggcgctgcggctctggcccgtg

SEQ ID NO: 8426 - DNA, 72 bp, Homo sapiens
ctaattcttggaaagttaacagagcaaagcatgcccgctagggaactttcaccttggaacttctaccctctg

SEQ ID NO: 8427 - DNA, 72 bp, Homo sapiens
ttcctcacaaggaggcaatacaggaggagccgagccggctgagggtcgaggcgaaagtgaggtctggctcaa

SEQ ID NO: 8428 - DNA, 72 bp, Homo sapiens
gagactttgaggacgctgcattttggacagaagggcgagggaaggaacatcgcagcaggaggaagcaataca

SEQ ID NO: 8429 - DNA, 72 bp, Homo sapiens
gtgtacttcattccctctacagcccttgatcaagtcggtaaaaccggcggcccttctctggagaggtgggaa

SEQ ID NO: 8430 - DNA, 72 bp, Homo sapiens
gctacacggtgcgtgggccgaggctccggcatcagcgtttcgggctgttcttatgcttgtggtggccacagg

SEQ ID NO: 8431 - DNA, 72 bp, Homo sapiens
tttctatttccagttggacctttctcttcaactcccgtctctataaccccacttgaacaggcatctcaaacc

SEQ ID NO: 8432 - DNA, 72 bp, Homo sapiens
ccgcgtgctgggggtcacggggctcccgctgctgacgaggaagcagggcccaccctgtccagcctcggcctc

SEQ ID NO: 8433 - DNA, 72 bp, Homo sapiens
cctgcgtgcgtgctggggctggcatctgcctggttcgcatttggcggtaaatatcaccgtctgcacacgggg

SEQ ID NO: 8434 - DNA, 72 bp, Homo sapiens
gttggactaaagcccaggtctgactcttcaacccacgcttgttcctctttgctcctctgtttcttagaatat

SEQ ID NO: 8435 - DNA, 72 bp, Homo sapiens
tcctacacaaagtggggtgaacctgtgccaagttccgatgggcgcaggagggcgcggaggctctaggcggcg

SEQ ID NO: 8436 - DNA, 72 bp, Homo sapiens
cgcaggctcctggcgcgccccgcatgcctccagcacgtttacctttccgaagtggcaggaatggggaaagcg

SEQ ID NO: 8437 - DNA, 72 bp, Homo sapiens
cctaaaagggcggagcccagagaggtgtgtcactccgggtatcaattcctataaatcagatcctgacaatca

SEQ ID NO: 8438 - DNA, 72 bp, Homo sapiens
ccagcagctgtgagaggtcatcagcctctgatcaccggtctccaagagggtgacctgacactcactgtaagt

SEQ ID NO: 8439 - DNA, 72 bp, Homo sapiens
tttggcagctttacctggttggattctacaagtagcgtggcaccaggaagagaaaaaaaacaagatgcaggg

SEQ ID NO: 8440 - DNA, 72 bp, Homo sapiens
aggcagagacgctcctcagctcccagacagggtcgcggccgggcagaggcactcctcacatcccagacgggg

SEQ ID NO: 8441 - DNA, 72 bp, Homo sapiens
ctttcaccgccgcttccctttcatctcgggctcggcggaggcgctcaattaaaagcctatcagtttgtaagt

SEQ ID NO: 8442 - DNA, 72 bp, Homo sapiens
cagccgcggccggccaggcggcagcgcccgccccgcgctccagaccccaccctccggcctagccaccgcccc

SEQ ID NO: 8443 - DNA, 72 bp, Homo sapiens
cggaatgcgtgggggcttcctgcaacatcagtctccgccgccctccactaaatcgcgaccctgggaaggtgt

SEQ ID NO: 8444 - DNA, 72 bp, Homo sapiens
ggttctttgtttttcatttttgtgtgtgggctctccgtgctttgaagttccagccagcaacaaagagaaaaa

SEQ ID NO: 8445 - DNA, 72 bp, Homo sapiens
aaattccctatttcttagcagcattgtgggtcaaacgaggactatgtaatccttgggctccaaagacatagc

SEQ ID NO: 8446 - DNA, 72 bp, Homo sapiens
ggtgaaagtctgggtgagggagtggcattgtccagcgaatgtggctgatggcatgtccatcagggaatttca

SEQ ID NO: 8447 - DNA, 72 bp, Homo sapiens
atgttagtcaccaacttgtattaagaaaccctggccgggcgcggtggctcacgcctgtaatcccagcacttt

SEQ ID NO: 8448 - DNA, 72 bp, Homo sapiens
agtggggctggccgtgcgggggattcgcaggggcgcggggaggatgctggggatggagatacaggaggcggc

SEQ ID NO: 8449 - DNA, 72 bp, Homo sapiens
atttaaagcttgcccccaactcttcccaaaactcacgtaatttgaatgagaatacaaaactcaaaacaaaaa

SEQ ID NO: 8450 - DNA, 72 bp, Homo sapiens
gagcccaggaggttgaggctgcattgagccatgatcgtgccactgcactccagcgtgggtggcagagagaga

SEQ ID NO: 8451 - DNA, 72 bp, Homo sapiens
aatcccagctactcaggaggctgagggatgagaatcgcttcaacccggaaggcagaggttgcagtgagctga

SEQ ID NO: 8452 - DNA, 72 bp, Homo sapiens
gtctctgcaaagctctctcttcatgaaggcccaaacgcttgtaaggaaatgccttattaatgctcacaatat

SEQ ID NO: 8453 - DNA, 72 bp, Homo sapiens
gtcctgtctaccacaattacaaacagccccactttcgggtgtagcagtcccaggactggcaagctacccaac

SEQ ID NO: 8454 - DNA, 72 bp, Homo sapiens
tgctaagatctgctgggagatgcttcctcagcaggcggcctctgtggctgccgttttcttcacaggctgcag

SEQ ID NO: 8455 - DNA, 72 bp, Homo sapiens
ttgtgcaatctccagaatgtttcgtgttgcaaaaccgaaactgcactcattaaacaactccccattccccct

SEQ ID NO: 8456 - DNA, 72 bp, Homo sapiens
agtcttaagaagctgtattgtttttctgaacccaccggaggttacaatgtatatgctttcttaatatactgt

SEQ ID NO: 8457 - DNA, 72 bp, Homo sapiens
ttggggagccattcctttccttacagttaggaaggcgacagtgagtgagtctactaggacttgtctggcggc

SEQ ID NO: 8458 - DNA, 72 bp, Homo sapiens
ccacacaccctgctgcccccgctgcccttttccggcgactacttcagccccggccagcggtgagacccaggt

SEQ ID NO: 8459 - DNA, 72 bp, Homo sapiens
aagcagttacctctcatacatcagccaagaagtgacgttacttacatgcaatacaaagagagtaaatccaag

SEQ ID NO: 8460 - DNA, 72 bp, Homo sapiens
tggcccgggcaggagtctgccactctgcctctggccgcagtctctcctgggctggccatccggtctattctg

SEQ ID NO: 8461 - DNA, 72 bp, Homo sapiens
gccaagcgcgagtcggcccagccaaagcgcatgcgcgaggcgcgcgccgctttttgcttcacagtgcttccc

SEQ ID NO: 8462 - DNA, 72 bp, Homo sapiens
ggctcgggttctggcgggagcccctgggccgtgcgcgcagccggctcgctccgcctccagccgcgcacgcgc

SEQ ID NO: 8463 - DNA, 72 bp, Homo sapiens
gaaactgggtgctccagtggcgcaatcggttagcgcgcggtacttatatggcagtatgtgtgcgagtgatgc

SEQ ID NO: 8464 - DNA, 72 bp, Homo sapiens
acactgaggtaaggagaaaagatgatggccatcttcgaggtctatcagcgggccaaggcctggcctggcccc

SEQ ID NO: 8465 - DNA, 72 bp, Homo sapiens
gcagaaaaagccaaaaccctccgggacaaatgaggcggctgagagcagagggtcttcctcacacatccacac

SEQ ID NO: 8466 - DNA, 72 bp, Homo sapiens
ctgttcctctgggattatttgcaccatggaaataacgcaattgctacataccagggattctttttttttttt

SEQ ID NO: 8467 - DNA, 72 bp, Homo sapiens
ctcccctgaggtttagcatcagtctttaatgctgtcgcacttcattgactagtcacacactttggtctcatg

SEQ ID NO: 8468 - DNA, 72 bp, Homo sapiens
gcctgctgctggtgggggtcagctgcacggatgcacggcctcgcaccagcggcagccccagaggccatgcat

SEQ ID NO: 8469 - DNA, 72 bp, Homo sapiens
accagcagccagtagagcaggtgttgtaacaaggccgaggaccctcagacaccaattttgctggtaagaccg

SEQ ID NO: 8470 - DNA, 72 bp, Homo sapiens
gccgcctcagcatcccaaagtgctgggattacaggcgtgagccaccacacctggcaaactactttaaagcag

SEQ ID NO: 8471 - DNA, 72 bp, Homo sapiens
aaagtgctaaaattacaggcaggagccactgcacccggcctatcagctgcttttaacagggaggatttgcca

SEQ ID NO: 8472 - DNA, 72 bp, Homo sapiens
gtacgaagagttccccagtaccctcgaagtttcctcgactgtttcaaagctggctgcaggcccaggctcatg

SEQ ID NO: 8473 - DNA, 72 bp, Homo sapiens
ggcagaccctacctgagtgaggggcccacgaggagcgtcagccgccagctgtctagaacttcagccccgaac

SEQ ID NO: 8474 - DNA, 72 bp, Homo sapiens
tgggggaagctgccccggcagcgaggctgagggagcgggaagggctgggcctggcagaggaagagcagccgc

SEQ ID NO: 8475 - DNA, 72 bp, Homo sapiens
gtctgcaagtcaaattcagccttgcttccccttctcgccctctggtgatttaaaatagggatacatcatcta

SEQ ID NO: 8476 - DNA, 72 bp, Homo sapiens
ctattcacgattatgacaaacacttgtttaaccaccgcaaaggcagcatgtcgcattttcttatatactcaa

SEQ ID NO: 8477 - DNA, 72 bp, Homo sapiens
gaacgggcgctcgccagtgtggatgcgggcgtggccgctaagcaccgaggactgggtgaagcccttgccgca

SEQ ID NO: 8478 - DNA, 72 bp, Homo sapiens
cggcatctcagaaaagggatggggaacctacaagtcgccgtcgcctgcctggctcattctgtaccactgaat

SEQ ID NO: 8479 - DNA, 72 bp, Homo sapiens
gccctgtgcggccaggcaggaaggcttccgtggtgcggccacgcgtcctccctttctcaacagaagctgaca

SEQ ID NO: 8480 - DNA, 72 bp, Homo sapiens
gctctcagggccctacctggtgacctcactgggggcgtgtggttatggaggggttttctcccttgggggaca

SEQ ID NO: 8481 - DNA, 72 bp, Homo sapiens
atcctgttttgaaatcttgatttgctttaaaagcacgtagatggttgttgacagatttttgttggtcctggg

SEQ ID NO: 8482 - DNA, 72 bp, Homo sapiens
cttcaaacctttggtggtggggggtgttacatgaacggctgctggggttccttaataccttaaagttacatg

SEQ ID NO: 8483 - DNA, 72 bp, Homo sapiens
ctttttccgcttcctcctgcttgcaattagctatgcgagccaagggctctctctcctctcttactctcttcc

SEQ ID NO: 8484 - DNA, 72 bp, Homo sapiens
cacatccgggcacccggatgtttcctggcgggaaccggatcctgcctgggtgggggtgggagtgggcgtggg

SEQ ID NO: 8485 - DNA, 72 bp, Homo sapiens
caatggcatctgctcatttgtccatttgctcctctcgtgagccacaagggtagggacttccttgtatcatct

SEQ ID NO: 8486 - DNA, 72 bp, Homo sapiens
tcaatgatgaaaaggagaagctgttggaaagggaacgtaagaaagcactacttcaagccctggaggagaaat

SEQ ID NO: 8487 - DNA, 72 bp, Homo sapiens
agagaattaaaggtgcgccttctttctcccaggaccgaaattttgttactgctgcttctgttgttattctgg

SEQ ID NO: 8488 - DNA, 72 bp, Homo sapiens
gaccactgggtgagcgcccaggaacgccggacgcgcgccttcacgcccgggtgcctggcggcgttttagaaa

SEQ ID NO: 8489 - DNA, 72 bp, Homo sapiens
tagtagcaacacaaagatttaatttaataacctaacggatcatctttcttaagttattaaaataccatataa

SEQ ID NO: 8490 - DNA, 72 bp, Homo sapiens
tggcaacttgtaaacaatgctgacatcatcctcatcgctggttatcataacaatttaatatccatcaattca

SEQ ID NO: 8491 - DNA, 72 bp, Homo sapiens
ctttaaggaagtagttaaggttaaataaggtcatacgggtgagccctattccaaaaggacctagtgtccaca

SEQ ID NO: 8492 - DNA, 72 bp, Homo sapiens
attcgagggtgacttggagtattttagagatgacccgaaaattggaagccaaagggcggctgcttcctgtat

SEQ ID NO: 8493 - DNA, 72 bp, Homo sapiens
ccgttctcaatgagctgttgggtacacctctcagacggggtggtggccgggcagaggggctcctcacttccc

SEQ ID NO: 8494 - DNA, 72 bp, Homo sapiens
gggaggcagcgggtctccccaggttaagaggccagcggaggacgcgcgcggtctccttgggggagggtgcgg

SEQ ID NO: 8495 - DNA, 72 bp, Homo sapiens
ctaggaagcaggactattactctgacacctcatctcgctcctctgccctgccaaaccaggctcaaactcctg

SEQ ID NO: 8496 - DNA, 72 bp, Homo sapiens
ggtggccctggtgtcgggcaatcaaggttcctcttcgccccttcccactcttgctgttagtggccaaactgc

SEQ ID NO: 8497 - DNA, 72 bp, Homo sapiens
gggacgaacgtgattattcaatgggcatgcgcttccggccacgcatcacacgcacatacaccagcgcggtta

SEQ ID NO: 8498 - DNA, 72 bp, Homo sapiens
aagcactgggagcacgtaggaggggccgcgccagccgtcctcccggcttctcatcactggcattgtttcaga

SEQ ID NO: 8499 - DNA, 72 bp, Homo sapiens
tgatggaagttgtagttcagacgatggaaggccaccgttgcctgggaaacggcttcccaaatccccgagaaa

SEQ ID NO: 8500 - DNA, 72 bp, Homo sapiens
gaagtcacaagggtaatggccctcttttccccaaacgttaaggacctacctctctgggttttgcctttttaa

SEQ ID NO: 8501 - DNA, 72 bp, Homo sapiens
cacacaatactggcatgcctctggtgtgctggtgacgggaaacatatgcaaagcagatacccttccatcttg

SEQ ID NO: 8502 - DNA, 72 bp, Homo sapiens
ggctgggatgtgtaggttgtagtgagccgagatcacgccactgcactccagcctgggcaccattgagcactg

SEQ ID NO: 8503 - DNA, 72 bp, Homo sapiens
accctaaccacataaaattaatgcttaacttttatcgttaggtagccaacctagaactgaaatagagttcag

SEQ ID NO: 8504 - DNA, 72 bp, Homo sapiens
gcccagcagcccaatattgagcctgtgtgagttgccgtttgtgtagtgaagcaatagaggccatggtctgga

SEQ ID NO: 8505 - DNA, 72 bp, Homo sapiens
taatgaaactgttgtctcctgcacagtcggctctgcgtgaattactctttctctattgcaattccgctctct

SEQ ID NO: 8506 - DNA, 72 bp, Homo sapiens
agttgttatttcgtttctacctctttggattaactcgggagattcaagaccatgcaagtcaagattactcga

SEQ ID NO: 8507 - DNA, 72 bp, Homo sapiens
gggaactctgaaaactcattagttgaggataactacgcctaccaacagaatgcagaggtgcaagactgagct

SEQ ID NO: 8508 - DNA, 72 bp, Homo sapiens
gtcggtcacgtcgtaggactgctggcggaggtgcgcgtgctgctgcgcggggctacccgcagcacccgcgcc

SEQ ID NO: 8509 - DNA, 72 bp, Homo sapiens
agaagtgggaatgtgagatgatttgtctttttacacgcacagaaataacttatttaaattgctatgcctgtc

SEQ ID NO: 8510 - DNA, 72 bp, Homo sapiens
aggctccgcgatgcttggggccacgcactgcatggcggccacgcgcttgaagaacgcagacttgcgatggaa

SEQ ID NO: 8511 - DNA, 72 bp, Homo sapiens
cgtgcgcacagtgggaaaagttcgagtggcccaggcgcatgtgcccagccaaggcggaacagaggcctcctc

SEQ ID NO: 8512 - DNA, 72 bp, Homo sapiens
ggtcggaagagcaagagagagaaaggtaaacttcccggcaggggacagtgaattgcttttaattacctgctg

SEQ ID NO: 8513 - DNA, 72 bp, Homo sapiens
gtttacagccagttcagtaagtttgtgtgtttcaccgtgtgtgtgtgtacagagctgtgtgggtgttgtctg

SEQ ID NO: 8514 - DNA, 72 bp, Homo sapiens
gagcagagagcagaatactcacagaggagctgcagcgaaggaggaaggctaatcttctgggcagaaccccag

SEQ ID NO: 8515 - DNA, 72 bp, Homo sapiens
ccctagcccagctcagggacttggcgtttcccctgcggtttcgcaaccctggggttttagagggaaactgct

SEQ ID NO: 8516 - DNA, 72 bp, Homo sapiens
ctaggagaagacaagatggcgcccagcaggaggagcggagaaaggcaggggtgtaaatctggcttccaaact

SEQ ID NO: 8517 - DNA, 72 bp, Homo sapiens
aaaccgcccacttgctctccttcccgtctgtgaagcgctcgttcagagccgcaggactccgcaaacaataaa

SEQ ID NO: 8518 - DNA, 72 bp, Homo sapiens
cactctgccctctctgctggcccacaggcccctcccgtggatggacctgcagggttgcctcccctcatgtcg

SEQ ID NO: 8519 - DNA, 72 bp, Homo sapiens
aggcgccaactcagacagaaactgatccaagccctcgtctctgttctcgcagatggcctgggaaaggaaacc

SEQ ID NO: 8520 - DNA, 72 bp, Homo sapiens
ctccagactagcaggaattttcctcaggggcaacacgtcctctaaaaaccttcactggcaagaaaccaagaa

SEQ ID NO: 8521 - DNA, 72 bp, Homo sapiens
ctccggtctcccaagtagttgggaacataggcacgcgccaccacgcccagctaatttttaatttttttttta

SEQ ID NO: 8522 - DNA, 72 bp, Homo sapiens
tagctttaacaagctgtgagagctgattcatgccccggcacagctagagggagggaggtggccatggagggg

SEQ ID NO: 8523 - DNA, 72 bp, Homo sapiens
actcgttattgcacaagtaaaagccttacagtggtcgctggggccccttgggatctgcctgccatcagctca

SEQ ID NO: 8524 - DNA, 72 bp, Homo sapiens
cccaaagtgctggggttaacaggcgtgagccaccgcgcccggcctgggtgatggttttaatgcacggctctt

SEQ ID NO: 8525 - DNA, 72 bp, Homo sapiens
aagaagtgtgcctgggagcctgagctcgtaaccaccgcttgtgacgatgacaatgcctggcagtcgtcatcc

SEQ ID NO: 8526 - DNA, 72 bp, Homo sapiens
aggcgagcgccggacagcggcagggactcgccacccgcagccgtggagccgggccatgagcgcctgtgcggc

SEQ ID NO: 8527 - DNA, 72 bp, Homo sapiens
atttttgcccactagttcccatcctgtattcctgccgtcagcactctgattgagccacattctgctctgcct

SEQ ID NO: 8528 - DNA, 72 bp, Homo sapiens
catggcagatggggaaacaaacacacccttctccacgtggcagcaggaagtgccgaacaagagggaaaagcc

SEQ ID NO: 8529 - DNA, 72 bp, Homo sapiens
tgggcccacagtacccgggaaggtgagtccttactcgggggcccagatctccccacggaggccacagatctg

SEQ ID NO: 8530 - DNA, 72 bp, Homo sapiens
tgggaagctcagaaggaacctctggatttgtttaccggtgtcaggaatggaaactgctggggcacctgtgta

SEQ ID NO: 8531 - DNA, 72 bp, Homo sapiens
ggaaagccacagggagcccgggagcccagcgggagcggggcggtggggaggccagcctgccgctcttccccc

SEQ ID NO: 8532 - DNA, 72 bp, Homo sapiens
ggctccagacagccgcccggtgagcccaccaaaggcgcgctcctccagtggccgggacacagcaagaagggg

SEQ ID NO: 8533 - DNA, 72 bp, Homo sapiens
aaaggggctctggggaattcactcaggccttgctacggctcctgccagcccagtgagcgacgggcacagccc

SEQ ID NO: 8534 - DNA, 72 bp, Homo sapiens
gtgctgtgggatgtagttgtctgagggtcagaactcgttccatcctgaggctgtgtgcaggtgtgtgtgacc

SEQ ID NO: 8535 - DNA, 72 bp, Homo sapiens
ctctcccgggaatgtacccacaggccccctctacgcgcttgggttgcccaggaaaccccaacggtgacccca

SEQ ID NO: 8536 - DNA, 72 bp, Homo sapiens
ctcctactcttagctcacatttatagatgagaaaacggaggcccagagaagggaagtgacatgctcaaggta

SEQ ID NO: 8537 - DNA, 72 bp, Homo sapiens
tcacctccatcacatattagccatgtgaccttgggcgagttgtttaacctctctttgcctcagtttcatcac

SEQ ID NO: 8538 - DNA, 72 bp, Homo sapiens
ctgaggcccgcattgtgcattgtttgcatagttcccggccaggtggccgggctctcaagcaaccaagggcag

SEQ ID NO: 8539 - DNA, 72 bp, Homo sapiens
tggatcagccggctgaaagcagcctttagaaccatcgcattgcatatccccaagtcgaacgcgcagaaccgg

SEQ ID NO: 8540 - DNA, 72 bp, Homo sapiens
cacaggtcaccaagcatgaggaagtactgtctatacgttttaagtaagagtccaggtaacacttattgttgt

SEQ ID NO: 8541 - DNA, 72 bp, Homo sapiens
aggcttaacagcttctcccagaccacatcgcagaacggcaggaagacagaggaaaatgccaggccctgaagt

SEQ ID NO: 8542 - DNA, 72 bp, Homo sapiens
tgaataccacggctgctctgcttgcttcctctcaccgcctccctccggccccacccgacaccctctcacctc

SEQ ID NO: 8543 - DNA, 72 bp, Homo sapiens
tggctccaaacagctccaggcaagaaaatgaagctcggaggggaactcaggagggaaggattggggttggga

SEQ ID NO: 8544 - DNA, 72 bp, Homo sapiens
atgggagctggggtcagggccgctgttgctgcagtcggccctacacctgcctgggagggctggaccagtcct

SEQ ID NO: 8545 - DNA, 72 bp, Homo sapiens
cgaatcacgaccacctgcaccctcctgccccggcccgccccccaagtcctcaggcacccagctccccggcgc

SEQ ID NO: 8546 - DNA, 72 bp, Homo sapiens
cgggtttccccaccggacggccgggagggtgggaccggggcgggacctcccccagctgcactaacgcgcccg

SEQ ID NO: 8547 - DNA, 72 bp, Homo sapiens
ccgggggaacgaaacacgcgtgctgtctgcagagtcgctttgaaattcctgccgcgtttttgcaacaggcaa

SEQ ID NO: 8548 - DNA, 72 bp, Homo sapiens
gccttgtttcctctttccagagccactagggaggacggtccagggcaaaggctgttcaacttacaagtagga

SEQ ID NO: 8549 - DNA, 72 bp, Homo sapiens
ggggaccaatcaggagggcagcctgcaaatgtcagcgcccggagagtcccccactccgcccgcccgctcgcc

SEQ ID NO: 8550 - DNA, 72 bp, Homo sapiens
gtctcaaggcactgacagcacagcatgaacccaagcggggcccttcaaggcaacggacgaccgcagggtcag

SEQ ID NO: 8551 - DNA, 72 bp, Homo sapiens
ttccatggaagcgctcattgaccagggctcaccagcgcctggcgatgcctacccttccgctttggagactgg

SEQ ID NO: 8552 - DNA, 72 bp, Homo sapiens
ataatgtgatggaacgaagtgggagagtaataagccgtatgaaaatctggaatagagcattccaggcagaga

SEQ ID NO: 8553 - DNA, 72 bp, Homo sapiens
ctgccagggaggccatcaactaaccatgaggggtgcggcatgattagagttggaggaagtagcccgaggctt

SEQ ID NO: 8554 - DNA, 72 bp, Homo sapiens
cctctattatcaatgattcatgaacaccctccctccgactcaagtgagcctcacattacaggtccctttcct

SEQ ID NO: 8555 - DNA, 72 bp, Homo sapiens
ttattacctttggtcaagacctttttcagtgttctcgacctaccttcctgtccaactgcctgtattttcttt

SEQ ID NO: 8556 - DNA, 72 bp, Homo sapiens
tgacttgttctctacagtattctcagaacttgctacgtggtaggaggtcaagaacacactgaataacccacc

SEQ ID NO: 8557 - DNA, 72 bp, Homo sapiens
tccgttcttactgtaaacggccccggccacctttacgagaaaccaggaaacttctgagagttactagcagcg

SEQ ID NO: 8558 - DNA, 72 bp, Homo sapiens
ttccagcacttacagtatcatcaatcttagcagaccgtattaagcatgtcaccccagtgacaccttctttac

SEQ ID NO: 8559 - DNA, 72 bp, Homo sapiens
ctgttgtttggagccacgtgcagtgattttacagccgcctgggaaacgcatacagtggtcctgtgctcttag

SEQ ID NO: 8560 - DNA, 72 bp, Homo sapiens
gccgcaccgtcctgtcagcctgcaacaaaggaggccggcctggcccggccctcacgccaaacggctcccctc

SEQ ID NO: 8561 - DNA, 72 bp, Homo sapiens
ttttgagaaagatatttaaataagctggagagactcggtgtctccagctttaaaacagaaatcagtctctgc

SEQ ID NO: 8562 - DNA, 72 bp, Homo sapiens
ctgcccaccacagaactggcccagaaagcaccctgcgtggaggcagatggtggacacatgcgtgtgcacgca

SEQ ID NO: 8563 - DNA, 72 bp, Homo sapiens
agaggagacgatctgacccaccagtttgtacatcacgtcctgcatgtcccacaccattttttcatgaccttg

SEQ ID NO: 8564 - DNA, 72 bp, Homo sapiens
cggtaacctttaatactagttagtctatttataaccgttccatctacaaacatttttctaatacaaacatgc

SEQ ID NO: 8565 - DNA, 72 bp, Homo sapiens
ggcactgaactgcaactggacctggaatcctgttacgcacaggtctgcctcccagagatggtgtgcggaacc

SEQ ID NO: 8566 - DNA, 72 bp, Homo sapiens
cctgagaggaacttttcctgggcttgcaaggtgtgcgcgaagagggaaaaggtggctgtacggcgccccgcg

SEQ ID NO: 8567 - DNA, 72 bp, Homo sapiens
catggggtgggggtggggtcactgtgaggtggctacggggagctggcagcaagctggatacatatcttttat

SEQ ID NO: 8568 - DNA, 72 bp, Homo sapiens
cctcccaaagtgctggaattacaggcgtgagctaccgtgcctgccctggaaatcactttcataaacaacctg

SEQ ID NO: 8569 - DNA, 72 bp, Homo sapiens
gtttcctcttggtcactgactctctgggtcactgacgctccttgaacagcagggccaccgtgtctccctttg

SEQ ID NO: 8570 - DNA, 72 bp, Homo sapiens
aaatcctataccagagagaagaaagaagagtgacccgttctgccctaggtcttttggttatttgaagtagct

SEQ ID NO: 8571 - DNA, 72 bp, Homo sapiens
tccaggctctgcttggtgggcttctggtgtggccgcgccctgtgtgtgtctctctctgtgtcctgccagtgg

SEQ ID NO: 8572 - DNA, 72 bp, Homo sapiens
tgaagccaatgagaccacgaacccgccaggaagaacgaacaactcaagacgtgccgctttaagagctgtaac

SEQ ID NO: 8573 - DNA, 72 bp, Homo sapiens
ccaccaccgtgcggctctctacactagcaagtttccgaagttcgccccagccggtttccctgaacaagttcc

SEQ ID NO: 8574 - DNA, 72 bp, Homo sapiens
aaaacggttgctctgcggcggattccggctcctcacgcaggaagagctccccagggagcctgtaaaactgca

SEQ ID NO: 8575 - DNA, 72 bp, Homo sapiens
ctccaagtaactagttgctgctgttgttaagctggcgtctttccagaaaacgaagtgcacttcctttgaaaa

SEQ ID NO: 8576 - DNA, 72 bp, Homo sapiens
cctcccaaagtgctgggattacaggcgtgagccaccgggctttcccacactttgatgagcatcagaatggcc

SEQ ID NO: 8577 - DNA, 72 bp, Homo sapiens
cttgtaaagaaggctgctaagagcctaaaacaaaacgcgccgagtttaagccctttctatttccctttaacg

SEQ ID NO: 8578 - DNA, 72 bp, Homo sapiens
tgcctgcacttcccccatcaaagcacttgtgatgacgtgcttggtttctgcttctctggacagccaagccca

SEQ ID NO: 8579 - DNA, 72 bp, Homo sapiens
gcctgtttgaacttcctgcactgactatctctgaccgtgcttttattgtttatttgtttgtcatctgtctcc

SEQ ID NO: 8580 - DNA, 72 bp, Homo sapiens
cccagcgcccccgcgcccctttggagttctgaccccgcgggtgcacccgtgtctcctggacacagaggctgc

SEQ ID NO: 8581 - DNA, 72 bp, Homo sapiens
tgcaggagagcgagagcacgtgctcctgctgctgccgggtgccagcctagcaacggctcccaggggcccaga

SEQ ID NO: 8582 - DNA, 72 bp, Homo sapiens
tcgaaagctatttaatccctgggttctgacgcacccggttcaccaccaagcgggatctagtgcccacaatct

SEQ ID NO: 8583 - DNA, 72 bp, Homo sapiens
gccacctggaaaacgaatcgtcccacctccacccacgacggacaatgccagcccatgccgctctgttgtcag

SEQ ID NO: 8584 - DNA, 72 bp, Homo sapiens
tggctaagcatccccatttcagggacttggtgacccgctttttgcggaaggggcagagtctgcaggattaca

SEQ ID NO: 8585 - DNA, 72 bp, Homo sapiens
agaaggtgatgcaatttgaggagggctcaacttgccgatgctggctttgaaggtgaaggaagaggaccacaa

SEQ ID NO: 8586 - DNA, 72 bp, Homo sapiens
tagggaaagagagtctcgtgggtcatccggcctgccggctctgtgtcctccctacactgacacactggcttt

SEQ ID NO: 8587 - DNA, 72 bp, Homo sapiens
gtcccgagtttcttcttccagtgggttcgtggtctcgctaacttcaggagtgaagctgcagaccttagcagt

SEQ ID NO: 8588 - DNA, 72 bp, Homo sapiens
cagctttgacgagggcagcgtgtcagagtctgagtcggagtcagagagcggccaggctgaggaggagaagga

SEQ ID NO: 8589 - DNA, 72 bp, Homo sapiens
tgccattccttttcctcagagggaatgggcttctccgcctccctctccaataggtgtggcaatcagctgtct

SEQ ID NO: 8590 - DNA, 72 bp, Homo sapiens
gagaccgcattccctggcttcccaggccctcttcccgctgccagctcctccaaaggctaaggaaccagctcc

SEQ ID NO: 8591 - DNA, 72 bp, Homo sapiens
cagaattaataaaagcttctaccggcatgcagagccgcgatgaaaggttgcagaacaaagtcattaaagtga

SEQ ID NO: 8592 - DNA, 72 bp, Homo sapiens
taagcccctcactgcctggggccggcggggcctgccggccgctcacagtgcagggcccgccaagcccacgcc

SEQ ID NO: 8593 - DNA, 72 bp, Homo sapiens
gcgcttcccaagtgaggcaatgcctcaccctgcttcggctcgcgcacggtgcgctcacccactgacctgcac

SEQ ID NO: 8594 - DNA, 72 bp, Homo sapiens
gacaaagtccagttcttctccaaggtctcaccatccgctcgccgtctccctctgacgtcccaaggacggtca

SEQ ID NO: 8595 - DNA, 72 bp, Homo sapiens
ctgagcgcgggccggcatagatttcctcttccacccgctgcggcttttctgagcacctggaagcatcggggt

SEQ ID NO: 8596 - DNA, 72 bp, Homo sapiens
ggactctctgcgtctctggagacaagggcactacacgcacttcagaatgaagagttgtaagtcgctgacctg

SEQ ID NO: 8597 - DNA, 72 bp, Homo sapiens
aaggctcttgctcccgctgtcccgactgaccctgccgctcccccatgtggcctggcatggtggagcacacac

SEQ ID NO: 8598 - DNA, 72 bp, Homo sapiens
atggggaagcagtggagccggcagggaattactgccgggtaggagttcgcagaggagcaccttacttttgga

SEQ ID NO: 8599 - DNA, 72 bp, Homo sapiens
gtttggtctcggaggcctgcggggcagtggtcccccggctcttgctgccctgcggttcagttcctcctgctg

SEQ ID NO: 8600 - DNA, 72 bp, Homo sapiens
ctgccaaaagaggatttccaggctcctgaagcgaacgcggtgaccaagaacagggttagacccagcgcgggg

SEQ ID NO: 8601 - DNA, 72 bp, Homo sapiens
aattgttcccaaattggaacaactatcagaatcaccggaggatttgctaaagcacagatcactgggttctgt

SEQ ID NO: 8602 - DNA, 72 bp, Homo sapiens
cctgcctggagcagcacagccaatattggcagactcgcttccctgtgccaatatttctgtgctgctagagcc

SEQ ID NO: 8603 - DNA, 72 bp, Homo sapiens
ggcttggggtcctggtggggggcatagcagagaagcgccctgtggcctgtagttcccacactgattcagtcg

SEQ ID NO: 8604 - DNA, 72 bp, Homo sapiens
actgggtggctcaaaacaccagacatttcttctctcgccgttctggaggccagaagtccgaaatcacggcat

SEQ ID NO: 8605 - DNA, 72 bp, Homo sapiens
caccctgaagtttatattctcatcctaccaggcttcggaataatctcccatattgtaacttactactccggg

SEQ ID NO: 8606 - DNA, 72 bp, Homo sapiens
ggccgcacctgctgcctcggaaaggggtaccggagcggttgtcaagacacaatgaccccgacgccagactca

SEQ ID NO: 8607 - DNA, 72 bp, Homo sapiens
cactgggtgcagaggcccggctgtgtgacgcctggcggtggccaccctctctggggccagggccgccccggc

SEQ ID NO: 8608 - DNA, 72 bp, Homo sapiens
tctgactctgtctcactaacattttgcttctccaccgcctcacccttcacctcccatgttcttgactgccgg

SEQ ID NO: 8609 - DNA, 72 bp, Homo sapiens
ccctccctttgtcttggtttgtctgtctgtctgcccgggtctttgtctctggtgggcgtttgtctatccatc

SEQ ID NO: 8610 - DNA, 72 bp, Homo sapiens
gccctcctgggacagggaagctgcgaggatgagttcggggacgccccaggcccaggggagcgaggtctggca

SEQ ID NO: 8611 - DNA, 72 bp, Homo sapiens
ttggggaaggaaagtttgtgcatttcagcctgctccgaggggtgttccagcactgtgtctgggttttgcagg

SEQ ID NO: 8612 - DNA, 72 bp, Homo sapiens
gcccgcgggcctctgccgatgcgtggctgcccgcccgggcccaggtgctgactggccgccacgcagccaatc

SEQ ID NO: 8613 - DNA, 72 bp, Homo sapiens
agccactttcccagcccgaagggggccgctgggaacgcgaggaggccccggcccttcctgctccgtcgctga

SEQ ID NO: 8614 - DNA, 72 bp, Homo sapiens
gttctctctcttcctaacgtgggacccggggcaatcgctctccactgctgtaaaatgaggataaaaactttg

SEQ ID NO: 8615 - DNA, 72 bp, Homo sapiens
cactccgactttctggctgagcttcggaaggcccccgtggtggtgagaagctaagtcagccccagggccaca

SEQ ID NO: 8616 - DNA, 72 bp, Homo sapiens
cagtctaaacaaaggccagcgggggaggctccggacggtgaggcttggggaagccactgatccctggcccta

SEQ ID NO: 8617 - DNA, 72 bp, Homo sapiens
ccacgcaaagcatatgtttattgtggcactattcacgatagcagagacttggaaccaacccaaatgtccatc

SEQ ID NO: 8618 - DNA, 72 bp, Homo sapiens
agagcaggcctggctgcttccccaggccagctgcacggggaccttccatgtgggttaaatgtccacacccca

SEQ ID NO: 8619 - DNA, 72 bp, Homo sapiens
gacagatcagggagccggagatggggagaccaaggcgagtctcagggcccagcccacctgcatcagtcgggg

SEQ ID NO: 8620 - DNA, 72 bp, Homo sapiens
tctcaactctattccattgatctattatatatttccgtccattccagtaccacactatcctgattactttag

SEQ ID NO: 8621 - DNA, 72 bp, Homo sapiens
ggtaagaactgctggtggtaggagctccagcatagcgcacagggcgggcccagagaaaggcgggcccattgt

SEQ ID NO: 8622 - DNA, 72 bp, Homo sapiens
tactttattatcattgcttaacattcggggtcccacgctgagtgtgagctgggggcaggcaagattgattcc

SEQ ID NO: 8623 - DNA, 72 bp, Homo sapiens
ggcagtagtgaggggtttgacttccccgagtgtcacgctcagctgtgcccagagcgtgaggctggcagcgcc

SEQ ID NO: 8624 - DNA, 72 bp, Homo sapiens
aaaaaagtgcatgcagcccaggctgtggcctaggccgtcggttcccggccatgcctagctcctctgaggtcg

SEQ ID NO: 8625 - DNA, 72 bp, Homo sapiens
gctgaacatttcaagattgttctaatggccaaagccgtaggactgacaggtgtcactcagcatttctagtca

SEQ ID NO: 8626 - DNA, 72 bp, Homo sapiens
ggctctgcgggggtcggcggtgcccaggaggcctacggtccgtggccaggcttttatctagctgcaccttcg

SEQ ID NO: 8627 - DNA, 72 bp, Homo sapiens
aatccccgcgggttggtcggggcgggagcggggctcggtgttcggggctgacggcgggggcgaggccatggt

SEQ ID NO: 8628 - DNA, 72 bp, Homo sapiens
ctccgcgtactcctgttgggcgaaccctggctctccggtgttggttgtcacttgagcaactgatgggcttcc

SEQ ID NO: 8629 - DNA, 72 bp, Homo sapiens
ctacagtttattgttatagcagaagttgtgggagacgggagggcaccctccacacatactacagtgtggtca

SEQ ID NO: 8630 - DNA, 72 bp, Homo sapiens
ctgtcaccgcctgctgctggtgggggtcagctgcacggatgcacggcctcgcaccagcggcagccccagagg

SEQ ID NO: 8631 - DNA, 72 bp, Homo sapiens
tccctcctccttcctccttgcttagcaactgttgtcgtctggtaaatatttgccccaacaggatctggggct

SEQ ID NO: 8632 - DNA, 72 bp, Homo sapiens
gtattggaatattcgagtaaaccctggagtttcagcgccagcgcacgcctcttcatcagggcagcgcgtcgc

SEQ ID NO: 8633 - DNA, 72 bp, Homo sapiens
ttaaatagtatttcttggattgcctttaacaatggcgataaggccaaagcttctagtcttgacagaagtggt

SEQ ID NO: 8634 - DNA, 72 bp, Homo sapiens
ttttatactttaacaatgtttgcaaagttttcactcggcctctaacttatgaatttggggaaatacaagact

SEQ ID NO: 8635 - DNA, 72 bp, Homo sapiens
ctgcacttagctcaaggggcctcgaggactctctgcgtctctggagacaagggcactacacgcacttcagaa

SEQ ID NO: 8636 - DNA, 72 bp, Homo sapiens
agtagagctgtgaccaggaactggggcacagcctccgtgtcctcccctacatccccaactcaggtgttggca

SEQ ID NO: 8637 - DNA, 72 bp, Homo sapiens
aagtaatagagtgaaattgtctgcataattattttcgttggattgagaatcagcagccctctttgggttcag

SEQ ID NO: 8638 - DNA, 72 bp, Homo sapiens
gaaagggagaggagaaaattccccacccactcccccgatttggcccgtgtagcttccctttgagggtgtgtg

SEQ ID NO: 8639 - DNA, 72 bp, Homo sapiens
tctgtcatttcactgttaatgagagctgctggcatcgtaggtcctaagaggctgagtcccagagcaagctta

SEQ ID NO: 8640 - DNA, 72 bp, Homo sapiens
atggcactggtactgcagctgggagggactgaggccgtctagggcaccaagtcctccacaccctagctttgg

SEQ ID NO: 8641 - DNA, 72 bp, Homo sapiens
actagatgacagttaagagcaacagcttccagctgcgcagcccaaagggctcctgggaggccagtttcccgg

SEQ ID NO: 8642 - DNA, 72 bp, Homo sapiens
ggcgcggggctgccgctgctcccgggcctccatgtcgtcagtcaggtgggtgccccacattcccgtgggtgt

SEQ ID NO: 8643 - DNA, 72 bp, Homo sapiens
cggggcccactcctgcgcagcggcagcgatgcaggcgaggccaggccccccacgccagccagcccccgtgcc

SEQ ID NO: 8644 - DNA, 72 bp, Homo sapiens
accgcctgaggtcatacccaggcactgggtgttggcgggagcagtaaagcgccataaaagcaccacttggat

SEQ ID NO: 8645 - DNA, 72 bp, Homo sapiens
aagacaggaggatttttctagtcacgcacaacgaacgtttctctaatgctatgcatgagggaatgacagtgc

SEQ ID NO: 8646 - DNA, 72 bp, Homo sapiens
cggctcgccctggccacggaggaccggacctgttgcgcctctgtgagtttgccttatttctacctactcggt

SEQ ID NO: 8647 - DNA, 72 bp, Homo sapiens
accagggactgcagctgcaccagcaggtgccatcacgcttgtgatgtggtggccgtcacgctttcatgacca

SEQ ID NO: 8648 - DNA, 72 bp, Homo sapiens
ttggattttgcctccatggagatctcttccatctccgacatttaatgttctagagatagagtgaaaagacac

SEQ ID NO: 8649 - DNA, 72 bp, Homo sapiens
tagatagtgatggtaggctaaatatctacggcttccgtaaacgttcctctaaacctccctgtaaaaaacaca

SEQ ID NO: 8650 - DNA, 72 bp, Homo sapiens
tcccgacaggccaaagaaaccccagagccgtctttcgactgactacagcctggaagagaggccaagaccact

SEQ ID NO: 8651 - DNA, 72 bp, Homo sapiens
ggaatcagagataggagccctttctttttcctggccgccaggcctccatgtgcagggctggcagggaggctg

SEQ ID NO: 8652 - DNA, 72 bp, Homo sapiens
gtaaacatctgtgtgcaggttttagtgtggacatacgctttcaactcattcgggtaaacacttgagagcacg

SEQ ID NO: 8653 - DNA, 72 bp, Homo sapiens
gtgcatatggagcactgacagcagatgcatgaacacgttacctctgctatttcactcttgcaaaattctgtg

SEQ ID NO: 8654 - DNA, 72 bp, Homo sapiens
ctggtttttcaagaataatccatgactaaactctacgtaaattgctaggtcacattatcatttttccccatt

SEQ ID NO: 8655 - DNA, 72 bp, Homo sapiens
ctttgagcaagaaccagtccccaccgttaggtgggcgtttgttagggaagagccagccgccccgcctgttct

SEQ ID NO: 8656 - DNA, 72 bp, Homo sapiens
tgaatagaaagcctcagaatagagatagcctggtacgacactcttgaccaagttaataccagacaggtggca

SEQ ID NO: 8657 - DNA, 72 bp, Homo sapiens
gatgatgagacagatatggcgaaattagaggagtgcgtcagaagcattcaagcagacggcttagtctggggc

SEQ ID NO: 8658 - DNA, 72 bp, Homo sapiens
taaataggtgacagtgggcctctaacctaggatctcgatcaagctcaacagctgagtcatggtgtgtatgac

SEQ ID NO: 8659 - DNA, 72 bp, Homo sapiens
gtgaggcaggcgaggtgccagtggttccctgggcacggggcagaatcggaggaggacatcctctttctgagg

SEQ ID NO: 8660 - DNA, 72 bp, Homo sapiens
tctcctgaatggctgaggggtcagccagggccctccgccttggctgttgggagcgtgactggctctctgccc

SEQ ID NO: 8661 - DNA, 72 bp, Homo sapiens
actgccctctccccctcttcccctggtctccttcccggcgtgctgggctgtcacagaggaagcagtgaattc

SEQ ID NO: 8662 - DNA, 72 bp, Homo sapiens
aaggcgaggagctctccctcctactcccactcccacggactggcgcacacgaagcgggtagggcttttgtat

SEQ ID NO: 8663 - DNA, 72 bp, Homo sapiens
ttttcctctccgcagccttcctgggccgcctcacgcgcgctcagccctgcgcgagctgcgcctctccagctc

SEQ ID NO: 8664 - DNA, 72 bp, Homo sapiens
tagagggtgatgcaggggccagaggcagctacccccgtagtatgtaatggggcctgggaccaggagattctg

SEQ ID NO: 8665 - DNA, 72 bp, Homo sapiens
cattgtgactctggctctactttccaggaaatggccgggacacaaaggggcttctctgttccagcgcttgag

SEQ ID NO: 8666 - DNA, 72 bp, Homo sapiens
caccatatgccttgggggcagtggccatggattctcgggatgagaggcctcggtagaactgactagcttcct

SEQ ID NO: 8667 - DNA, 72 bp, Homo sapiens
ggaaaagacccaataatggattttacttccctcctcgatgtattagattttacgggaaatttaacatggtat

SEQ ID NO: 8668 - DNA, 72 bp, Homo sapiens
caccacgtacctatctcggattctcagtttcacttcgctggtgtctgccaccatctttaccacatcccggta

SEQ ID NO: 8669 - DNA, 72 bp, Homo sapiens
ctgaaaaccagggggtctgaaaacacatcccttcacggagcttaacagtcactcagggttaacaccacgggg

SEQ ID NO: 8670 - DNA, 72 bp, Homo sapiens
attaaagggaaatgcttctctgtccctggagccctcgcacaagccttgcggggagctgcctgcagaacgggg

SEQ ID NO: 8671 - DNA, 72 bp, Homo sapiens
aacaaaatgtctttaaataattactcctgcgcatgcgtacggggggacgtgactgaagtctcacactcctat

SEQ ID NO: 8672 - DNA, 72 bp, Homo sapiens
gagactgattcagtccccttttggcccccaagttacgtaaagataaggactttggagatgttttctcaggaa

SEQ ID NO: 8673 - DNA, 72 bp, Homo sapiens
acaggctcagcccctgcccagccctgcctggcacccgctcaatctggctgagctccagagaatggcagggct

SEQ ID NO: 8674 - DNA, 72 bp, Homo sapiens
gggaagccgccatcagctcagccacccacaacggccgccccgccggctgttcccagcagggctgtgcccctc

SEQ ID NO: 8675 - DNA, 72 bp, Homo sapiens
gaacagtcccaagcacttgaaacatttaactctcacggcaatcctaagaggaaggtagtgttttgtccccat

SEQ ID NO: 8676 - DNA, 72 bp, Homo sapiens
tctgtgttttgcattgagtggcctctcatacccaccggcctacataaaccaccctgggtttcagcttccgga

SEQ ID NO: 8677 - DNA, 72 bp, Homo sapiens
tagcatcagagtgtccctaagttgcccaagtcacacgcaactctggatataaccctagacccatccctcttc

SEQ ID NO: 8678 - DNA, 72 bp, Homo sapiens
atgtttgttaaaagagcctggcacctctgttgccacgtgatctctgcacacagcagttcctcttccccttct

SEQ ID NO: 8679 - DNA, 72 bp, Homo sapiens
ttacccggtttaatttcagtttaggccaaaatccccgcgggttggtcggggcgggagcggggctcggtgttc

SEQ ID NO: 8680 - DNA, 72 bp, Homo sapiens
tgcgagacaggggcagccagaggagcggctgctgccggcgcttttctttgcccatgaccacctccgccatct

SEQ ID NO: 8681 - DNA, 72 bp, Homo sapiens
cctgcctcggcctcccaaagtgctgggattacaggcgtgagccatcgcacccggctgtccgtcaatattgtc

SEQ ID NO: 8682 - DNA, 72 bp, Homo sapiens
tgcccaatccagacctgtgaccctggcaccggagccgcaggccccagtttcctgtggggctgagccccaggc

SEQ ID NO: 8683 - DNA, 72 bp, Homo sapiens
gccctgctcggattcttgtctccttcgcagtctggcgaggtcccctcactgttgacagtgaccagtcagctc

SEQ ID NO: 8684 - DNA, 72 bp, Homo sapiens
gagtagggaattcttttgctgcgctgcctcctacgcggagcctgctttccactgctgaaaagtgccgggcct

SEQ ID NO: 8685 - DNA, 72 bp, Homo sapiens
agtaaagaggctaacagttgtcagggcttgtcagccgatcatgggattgaatactactgaggtgagcaagtc

SEQ ID NO: 8686 - DNA, 72 bp, Homo sapiens
cagagacattcaaactgcaaaccaggatgagaagtcgatggttccgcactgtagacaggttttcccaagata

SEQ ID NO: 8687 - DNA, 72 bp, Homo sapiens
gcttctgaaaggcttgcttcactctctccctcaggcggagaaggagaatggccatgtgatccctgggacata

SEQ ID NO: 8688 - DNA, 72 bp, Homo sapiens
aactcagctagtccaagactgcctggagggagccccgcccccgcctccgcctccgcctgacgccccaggaag

SEQ ID NO: 8689 - DNA, 72 bp, Homo sapiens
gtctgggggtcaggggcaccccatctgggccagggcgctgctcaggcaggagagcaggggacgaaatccaag

SEQ ID NO: 8690 - DNA, 72 bp, Homo sapiens
tctggggaactcgccatcccgccttcccaactccccgccatgggccctcccagggctgcccctacaccaggc

SEQ ID NO: 8691 - DNA, 72 bp, Homo sapiens
tggttgaagtacatacaccctcatctatcggaacacggggcttagtaaagtgaaaagaagtaggttctagct

SEQ ID NO: 8692 - DNA, 72 bp, Homo sapiens
tattttgggggtttctttctggctctcacagtcctcgcatgctcaccatgttcccttcaatttcattagcac

SEQ ID NO: 8693 - DNA, 72 bp, Homo sapiens
agcaaagagctgcaccccctatttcctgcagcagccgctgtgaggggcttgaaaatccgcagagcatcggcc

SEQ ID NO: 8694 - DNA, 72 bp, Homo sapiens
ggaagttaatttggccgaggtatcacatctggttccgcgggttctggccctagacttgagccttttgactca

SEQ ID NO: 8695 - DNA, 72 bp, Homo sapiens
ctgctggaaaccaacagtcaggcccagcgcagtgccgggtctcccaacacaacatctgtgtgatacggccca

SEQ ID NO: 8696 - DNA, 72 bp, Homo sapiens
ctgaccctttgcgcttcctgagtgaggcaatgcctcgccctgcttcggctcgtgcacggtgcactgcaccca

SEQ ID NO: 8697 - DNA, 72 bp, Homo sapiens
tgggcaggctggttcagtgataagcaggagccaggcgacccacaggcttcttggatgggctgggcgtgcatg

SEQ ID NO: 8698 - DNA, 72 bp, Homo sapiens
gatagggcctccatctgttcccacggccttctatccgtgaatgaaaaagtgcaggagagaatgtccaatagg

SEQ ID NO: 8699 - DNA, 72 bp, Homo sapiens
tcatcttcactgcctctgccgaaaatatacgtctacgggagagccaggaatctctctccaagggtgaccggg

SEQ ID NO: 8700 - DNA, 72 bp, Homo sapiens
gctcttatgccggctgcctcacctccaggctcagacgccttttccagtttcagctaaatgtgaaacttttca

SEQ ID NO: 8701 - DNA, 72 bp, Homo sapiens
aagggtctgccccgggctgcgcagagccatgcatacagtaggtgctcaggaaatgcttgtgacctgaggtgt

SEQ ID NO: 8702 - DNA, 72 bp, Homo sapiens
tttttttttttttctgagacacagcctcactctgtcgcccaggctggagtgcaggttttcatgtttatctgt

SEQ ID NO: 8703 - DNA, 72 bp, Homo sapiens
gcctcagtttctccatctgtcaagtggagctgcggcgtggatccctctcatcacccagcctctccctcatgg

SEQ ID NO: 8704 - DNA, 72 bp, Homo sapiens
ctacagttgtcccatccagaagccacacacagcagcgggcctcaggaattgcattcctcgcagtgacaggag

SEQ ID NO: 8705 - DNA, 72 bp, Homo sapiens
gcagaggactacctttccctggtccgccccctggccgccccttggggaatgcaaacttcgtgttctgctgcg

SEQ ID NO: 8706 - DNA, 72 bp, Homo sapiens
gccctggactctgaggccgggcagcgaatgttctgcgggtgctgtctgcggccggatgtgggttttggcatc

SEQ ID NO: 8707 - DNA, 72 bp, Homo sapiens
cgcccccaccaccaccacccccagctcctcctggccgcctgcggtccagctgaggcccgcctcctccaggaa

SEQ ID NO: 8708 - DNA, 72 bp, Homo sapiens
ctagactcccaggccgaggtgcagggtttggaggccgaaataagaaggctccgccaggaggtgcgctcacat

SEQ ID NO: 8709 - DNA, 72 bp, Homo sapiens
gctctcctggttcccagatgctctggctctggctgcgaggcccagctttcctgcctcccttgccaaggaggg

SEQ ID NO: 8710 - DNA, 72 bp, Homo sapiens
cgcagtggtttgccaaacccgcagcaggcttaggacggagtggtgagaacagcccccttccttttcctcagc

SEQ ID NO: 8711 - DNA, 72 bp, Homo sapiens
acatagctctagggttagtagggttgtaatccagacgttgagtctgtcctgaagttttcaagtgagcaatac

SEQ ID NO: 8712 - DNA, 72 bp, Homo sapiens
aagcgggagcaggcggcctggcccaggagccaggacggccacagccacgccaccaccggcgagggcgagggc

SEQ ID NO: 8713 - DNA, 72 bp, Homo sapiens
gtggcccggccgtccgcgtccccaggccccgcgcgcgctctgcaccccggcctccccgctcacggtctcgct

SEQ ID NO: 8714 - DNA, 72 bp, Homo sapiens
tttatttccctccaccttctttgctgtcctctgaacgggttctgcctcgctctcctcactttcttccctggc

SEQ ID NO: 8715 - DNA, 72 bp, Homo sapiens
cggcctctcccagctactattgcataagcaggaaacgtagccagagaccagaaatcctgacaccaaggagat

SEQ ID NO: 8716 - DNA, 72 bp, Homo sapiens
ctaccaggaacaatggtcgctgtcacggcatctgccgcctattcttaaaccggtgagaaaaggccctggccc

SEQ ID NO: 8717 - DNA, 72 bp, Homo sapiens
ccggaggaagccacgcccctcacaccagcacaggtcggccttgaagggcgccaaggcctcccaccacgtgat

SEQ ID NO: 8718 - DNA, 72 bp, Homo sapiens
tccattctgaagccaaaggcactgggaagggcttccgcagaggagggtttggcaggggttgccaggaacagc

SEQ ID NO: 8719 - DNA, 72 bp, Homo sapiens
aagactgggatgtggagaggagccagaggccccagcggctgttctcccgcacctcgcctccacccctggccg

SEQ ID NO: 8720 - DNA, 72 bp, Homo sapiens
ccccttagttttaccatgaagataactcaggccgtcggagaaagtggcctgcccaacgcaggtgctagagcg

SEQ ID NO: 8721 - DNA, 72 bp, Homo sapiens
accgcccagcagtgtcctgccctctgcctgggcctcggtccctcctgcacctgctgcctggatccccggcct

SEQ ID NO: 8722 - DNA, 72 bp, Homo sapiens
atcagacctgcttttctctaaatcagaattaggcacgccactccagatgaaagagccctgtcgttgaaatgc

SEQ ID NO: 8723 - DNA, 72 bp, Homo sapiens
ctgatctttaccctggaatcttcctggaaggtgaacggcctatgtcatgcagttgttatgcaagaggtatca

SEQ ID NO: 8724 - DNA, 72 bp, Homo sapiens
atactcagggatgtgcaggggtccacctagacctccgggcccttgagctagacaacctgagcctcagcttcc

SEQ ID NO: 8725 - DNA, 72 bp, Homo sapiens
acctcaaggaaacttcaccagccgatatcaaatagcgaacactgcctgtcatacttccatagctagggaaag

SEQ ID NO: 8726 - DNA, 72 bp, Homo sapiens
aacatttcttgtgatagttcctgttagcaggcaaacgggagagcctcatcttgcgtgagagccctcccatta

SEQ ID NO: 8727 - DNA, 72 bp, Homo sapiens
tttcacaacagtgagctcttcttgtgcctaccacccggcatgagcaagacaagggggtgggtggtgggagag

SEQ ID NO: 8728 - DNA, 72 bp, Homo sapiens
aaggaggcccagagggtttctcagcttgtgcagtgcgtggcattgtagtatcctggatttcttctcccgtca

SEQ ID NO: 8729 - DNA, 72 bp, Homo sapiens
agcgaagggtacattttcctaatttgctcaagatgcgtggtgaaggccacgcaccagggatcttcacacata

SEQ ID NO: 8730 - DNA, 72 bp, Homo sapiens
tgattattttatttaaaaaaaaagccccacatctccgggcaataaactacaatacagtaaaaagtagcatct

SEQ ID NO: 8731 - DNA, 72 bp, Homo sapiens
cttccaccagccgctgttatttcgtgaccggaaggcgcctccccaaacacagcgccacgtgcaagagggttt

SEQ ID NO: 8732 - DNA, 72 bp, Homo sapiens
acttgcttctccaaaggagaagcgctcacgccacccgcccactgccccactgtgcaggttgacacctggttg

SEQ ID NO: 8733 - DNA, 72 bp, Homo sapiens
accccacacgctcctccctctgaggctgtaggactcgcagtcaggggcagctgaccatggaagattgagagc

SEQ ID NO: 8734 - DNA, 72 bp, Homo sapiens
aacttgcagcacaaagaatgaattcttttgggtttcgcaatccgtttcttccctgggcgtcttaaaatgcag

SEQ ID NO: 8735 - DNA, 72 bp, Homo sapiens
gaaaaccactgaactgggctggccacggtggctcacgcctgtaatcccagcactttgggaggccgaggtggg

SEQ ID NO: 8736 - DNA, 72 bp, Homo sapiens
aactgtcctctgatgcaatcgagagtgtgcagacacggtagacagatctgttttactggagggatccagggc

SEQ ID NO: 8737 - DNA, 72 bp, Homo sapiens
tgctatgtggtctttaccttccttcccaaacccaccgctcctctaccctccagcccccacacacatacacac

SEQ ID NO: 8738 - DNA, 72 bp, Homo sapiens
aaaagccatttcctccaggaagccttctcttttctcgaaatgagaggttgctgccaggtgccgtggctcatc

SEQ ID NO: 8739 - DNA, 72 bp, Homo sapiens
agtcaggtcctttgaggccaaggagcggagctgctcgggcccgtagtcctgaaacttcctctgcttcctcct

SEQ ID NO: 8740 - DNA, 72 bp, Homo sapiens
gactgcagggaaacagaagcgtggtgggcgctgggcgatgatggaatttctaacaaatgctttgtttctgct

SEQ ID NO: 8741 - DNA, 72 bp, Homo sapiens
tgcatatgtttacgccacaccggaactctctactgcgtctctcaaaagagacacaggctgggcttattttat

SEQ ID NO: 8742 - DNA, 72 bp, Homo sapiens
gcccaggcgagcctcaccagcgtacattagagaaacggaggtcgccgacctctttaccacagccgggccctg

SEQ ID NO: 8743 - DNA, 72 bp, Homo sapiens
gattctcacagatacaatgttgcgtaaaagcaagacgacaaaccatgtatttccacttacacaaagttcagg

SEQ ID NO: 8744 - DNA, 72 bp, Homo sapiens
ctgttttttagtctgattgtgttatttcctgtgcacgctgaggggagatttagagatgggaagaaaatatga

SEQ ID NO: 8745 - DNA, 72 bp, Homo sapiens
aagaatggtgttgctaaaccattatgactgcaattcgtgcatgttagaacctgtgcaaagcaaggtctgcct

SEQ ID NO: 8746 - DNA, 72 bp, Homo sapiens
tgagactggtgataatacagcagcagtgttgtgcacggagacaagaaaagcactgagtagagatctgatgaa

SEQ ID NO: 8747 - DNA, 72 bp, Homo sapiens
aagccaggcgagggccagcaccaccttccacctgccgtggcacgggtgcacaggacgttccaaggccaacca

SEQ ID NO: 8748 - DNA, 72 bp, Homo sapiens
gtttctgacggatcttgtcaagagacttaagtcatcgtcacagtatttcagacgaacgcagtgatgtggcca

SEQ ID NO: 8749 - DNA, 72 bp, Homo sapiens
ctcttgaaactgaacgttttgcaaaaggcccctttcgaaatttgaaaccctgtggccaccggccagagctga

SEQ ID NO: 8750 - DNA, 72 bp, Homo sapiens
ccgagggcgggagtaggggctggagcagcaccctgcggcgaggccccacaggagaatcgatggttctgatgc

SEQ ID NO: 8751 - DNA, 72 bp, Homo sapiens
gcctgaatcaggctctgatttccgagccaggagagcggcgcagcgctgagaggcgacgccagggcgcagcat

SEQ ID NO: 8752 - DNA, 72 bp, Homo sapiens
aaatgacaccaaccaagactgaacgccattattcacgtctttctttttaagatttttcttttccaatttgag

SEQ ID NO: 8753 - DNA, 72 bp, Homo sapiens
ttttgatcttggaggcaggagggttaaaaccgcaccggcgttgtctggtgagcaagccactgtcactcagaa

SEQ ID NO: 8754 - DNA, 72 bp, Homo sapiens
cccgcacggtggcatcttccagaaggtcatgcgtccgtccccacgtctttccagggccggttctccccggtg

SEQ ID NO: 8755 - DNA, 72 bp, Homo sapiens
aagcaggccgcatctgtcttgtccccagtgttgagcgcagtgtgtgctgcagcatggaagttgttccctaaa

SEQ ID NO: 8756 - DNA, 72 bp, Homo sapiens
aatgaaaaaagtgaagaggggaagcgcccttgtttcgctttgtgatcattctgccttgcagccccaggctaa

SEQ ID NO: 8757 - DNA, 72 bp, Homo sapiens
gtcttggctgataattaactgcatggcatcgcctgcgtattgtagagaggcaagggtgctgatttatgcatc

SEQ ID NO: 8758 - DNA, 72 bp, Homo sapiens
tgcctcagctgagttggtctccctcatcctgttcccgctgtccacagccccaccctaagctgatgaggaagc

SEQ ID NO: 8759 - DNA, 72 bp, Homo sapiens
gccgtgaccagggttgggggagtccacgtcgccctcgttgctctgggtggcacccggcccctgctctggcac

SEQ ID NO: 8760 - DNA, 72 bp, Homo sapiens
gttttcactatgtataaaaataaatctctctcctacgtaaaggattgaaggctcaactctgtgttgtaaact

SEQ ID NO: 8761 - DNA, 72 bp, Homo sapiens
aacaatttaggtcaagatttcccagcaagcacttacgatgccccaatctaggctggcatcataccaggctct

SEQ ID NO: 8762 - DNA, 72 bp, Homo sapiens
acagccaggtgatgggcagtgccaactcgaccctgcgggctgaagacatgtactcggcccagagccaccagg

SEQ ID NO: 8763 - DNA, 72 bp, Homo sapiens
cctgtcggcccctacttgtgtgtagagaataggcccgggtacaccacctcagaaatgcagaggaagccgggg

SEQ ID NO: 8764 - DNA, 72 bp, Homo sapiens
ttcaagacctctaaggaaggagccgcttgacaaaccgagggcgatcagccccacagaccccatcagattcat

SEQ ID NO: 8765 - DNA, 72 bp, Homo sapiens
agccccccagtcagcagtccacggccccacccacccgacggctcggccgtcaaagacctcctggcccctgcc

SEQ ID NO: 8766 - DNA, 72 bp, Homo sapiens
cataaattgcgaaatacttaggcaagaagattattcgagaagaattgtattgcttgttcagttatatatttt

SEQ ID NO: 8767 - DNA, 72 bp, Homo sapiens
atcagcgttattagcggccaggacagtgtggggggcgggcgggggtaaggggcctccccgcgcctcccagcc

SEQ ID NO: 8768 - DNA, 72 bp, Homo sapiens
tgtctaacatcttcactgtgagcttgggttccacacgtgtgtatgcgtttgtgcttgggagggggtgacaac

SEQ ID NO: 8769 - DNA, 72 bp, Homo sapiens
tttggtgaagttgctttgcaggtgcctttgtgtagcgctggagaatgaagaagttggtgacccgggtaaagt

SEQ ID NO: 8770 - DNA, 72 bp, Homo sapiens
ctcggcccggctctgaagggaaaacattaaagcaccgaaacagtggaaaaagagcatcaaagatgatgtctg

SEQ ID NO: 8771 - DNA, 72 bp, Homo sapiens
ccccggtgcagcgccctcccgccctcggcacccctcggcagccaggcgctggccacagaggccgcttccttg

SEQ ID NO: 8772 - DNA, 72 bp, Homo sapiens
cagagtacttttaagaacaaggaggtctctgcccacggcagcccaagcaggtaatagcggttggttgttact

SEQ ID NO: 8773 - DNA, 72 bp, Homo sapiens
gagtttttaaaaagctccagcagatcatgtcatgacgacttcgctgctcctgcatccacgctggccggagag

SEQ ID NO: 8774 - DNA, 72 bp, Homo sapiens
gtgaaatgtttgtgaaatctcgtggtgaagatatgcggagaatttctgaaagtggaatttcctgaagtaaaa

SEQ ID NO: 8775 - DNA, 72 bp, Homo sapiens
cggggagtgctcgcgagcctgggaagggcgccgtccgtcagagcctcgcggagggtgagcggccggcggctt

SEQ ID NO: 8776 - DNA, 72 bp, Homo sapiens
aggcgcccttctcagggattgtaggcttagtcacacggcgggggcgccctcggaggcaccggacctcagctc

SEQ ID NO: 8777 - DNA, 72 bp, Homo sapiens
aaatgaaactttgaaaaattacatgtttgtagatgcgtagaactaaacgggcaagccacactaggttttgtc

SEQ ID NO: 8778 - DNA, 72 bp, Homo sapiens
gctctgccggctccgcgcccgcctctcccggctcccgggccctgccgtcctcttgttccgtctgccttcagt

SEQ ID NO: 8779 - DNA, 72 bp, Homo sapiens
gccaccccagattgctcccaagagggagcgtaagacggtgagtagcagtgaggggctccgggacatctggga

SEQ ID NO: 8780 - DNA, 72 bp, Homo sapiens
ggtgcctttctttacccttcttaaaggttacagggcgtgaacggcaatcaggctcgattctccaccctctgc

SEQ ID NO: 8781 - DNA, 72 bp, Homo sapiens
gtggtcttgtagtgtagctgagaacgtttggggtgcgttaaaatgcgtttcaattggagtatgatttagcag

SEQ ID NO: 8782 - DNA, 72 bp, Homo sapiens
ggctgtgacgagcatggtccctgggcagcagtggacgtggtctcacacccagagtctgaaatttctgcctct

SEQ ID NO: 8783 - DNA, 72 bp, Homo sapiens
actaacagtgtgatgtgagcatctgcgtaaaaaggcgacatatggagcatgcccagtgtgggagtgcgtcct

SEQ ID NO: 8784 - DNA, 72 bp, Homo sapiens
aaaagccaaagcagccaacaaagccacagccctatcggctgtactgggctctgccttttgggcagctcgccg

SEQ ID NO: 8785 - DNA, 72 bp, Homo sapiens
tgttctagagcacttgcaattagtggtgaacaacacggtctctactccaaggggctcacattcttgtgcaga

SEQ ID NO: 8786 - DNA, 72 bp, Homo sapiens
acatcacagagagtaggatggctactataaacaaacgaacaaacagcacacaagtgtcaatgagattgtgga

SEQ ID NO: 8787 - DNA, 72 bp, Homo sapiens
ttttggttgacacaccaagctcaagcaggaagaaccgggctcaagaactgtctctctcctttctctctgtta

SEQ ID NO: 8788 - DNA, 72 bp, Homo sapiens
gagcccaagagtaacaggctcaggctggggcgggtcgcctgctcctgggctgccagccccctggaggccctg

SEQ ID NO: 8789 - DNA, 72 bp, Homo sapiens
actgaaacgagaacgggctgcagctctgtgcctagcggacctccacaccagcagcctaacgtgctcaaaatg

SEQ ID NO: 8790 - DNA, 72 bp, Homo sapiens
cctccatgaggaaataactagaaaagaagaggaagcggaaagaaaatgtgcaaaggccctggggcagagaaa

SEQ ID NO: 8791 - DNA, 72 bp, Homo sapiens
aaacagcagtatcttctaagccctgggggcttccccgggccccagccccgacctagaacccgcccgctgcct

SEQ ID NO: 8792 - DNA, 72 bp, Homo sapiens
ccctcctccctctccaagggctgccggggagaacacgctcagaggaggcagctctaacccagggctggggac

SEQ ID NO: 8793 - DNA, 72 bp, Homo sapiens
atacgccgaagccaagatgccgagatgtcgagatacgcagatgccaagatacgccgaagccgagatacgccg

SEQ ID NO: 8794 - DNA, 72 bp, Homo sapiens
actggctaaccacatggctcttccttcagatgacacgacctcagtgccaaaggcactgcttttgcacagatt

SEQ ID NO: 8795 - DNA, 72 bp, Homo sapiens
gttaacaggctggggccatacagctaagtaaacaccgacgcacgattcgctcacacggaataagaactccac

SEQ ID NO: 8796 - DNA, 72 bp, Homo sapiens
accccaccggggtgtcatccaggaggaagggtgcccggggcgaggtcccccaggagaagtgcccaggcctga

SEQ ID NO: 8797 - DNA, 72 bp, Homo sapiens
gtttgtgggggtggagtgggaagcggtgagacctccgcgggaggagactttcctgaacgctgttgaaattgg

SEQ ID NO: 8798 - DNA, 72 bp, Homo sapiens
cctcaccttgctgcacttgatgcacttgtaggagccgccgcccagcagcaggcgggtgcacagcagctccga

SEQ ID NO: 8799 - DNA, 72 bp, Homo sapiens
ctcaccacctctcagtgggaagaggaggcttgtttcggttattctgcaggaaagtctgcaatagtagctctc

SEQ ID NO: 8800 - DNA, 72 bp, Homo sapiens
gtgccacgaagcaccggggatttacggccgacccgcgctttccgatcggtttctctaccccggcccatccag

SEQ ID NO: 8801 - DNA, 72 bp, Homo sapiens
gccccagtgcaggtctgggaaaggggagagtggtgcgttgtgaagcgcagaaagacctcaagtgtctgggca

SEQ ID NO: 8802 - DNA, 72 bp, Homo sapiens
tcatctgtgtcacaggaggacatctgcctagcctgcgatcagaaagaattttcagtctctttctgtgggtac

SEQ ID NO: 8803 - DNA, 72 bp, Homo sapiens
cggcgcagggcggtgctcagggctgtggaatgccccgaagggcgtaggctcggggtctcccagccaggacac

SEQ ID NO: 8804 - DNA, 72 bp, Homo sapiens
agttacttatttgtaaccagaattagacagcaaatcggatgcaggggagaagtcaggtgactattagtctgc

SEQ ID NO: 8805 - DNA, 72 bp, Homo sapiens
tgatttgataagggtttattttggagggtagagatcggagtgtatttgaccacgtttactctggagtatgtt

SEQ ID NO: 8806 - DNA, 72 bp, Homo sapiens
ctccatgagcgccacggactgcagctgcttctaatcggctgtcttggccctgtccccagaattgcttcatta

SEQ ID NO: 8807 - DNA, 72 bp, Homo sapiens
gggccactgagagctgtggggacacagcccacagccggactggtcctggtgcgccttggccccaccacttcc

SEQ ID NO: 8808 - DNA, 72 bp, Homo sapiens
gaagcgcaaaagaaaatgtgctgttgcatagacagcgcaaataaataatggttcttgtgataatcagctttt

SEQ ID NO: 8809 - DNA, 72 bp, Homo sapiens
ttgattgacttttattaagctattgaccaaaactacgttaggcttgcataataaagggctgagtaaaacaca

SEQ ID NO: 8810 - DNA, 72 bp, Homo sapiens
ccaacccttccagataaaactccataatcctgtctcgtctctaagtattttattacaaccccttaacagttg

SEQ ID NO: 8811 - DNA, 72 bp, Homo sapiens
aagaatgtcaagctttcttatttaactcttccttgcgtgtatcaggccatgagtgagaattactgtgacgac

SEQ ID NO: 8812 - DNA, 72 bp, Homo sapiens
ctgcaggatgggttctgagggcagaacccagaggacgtgcagtgaggaagctggaagagagcacactccctg

SEQ ID NO: 8813 - DNA, 72 bp, Homo sapiens
gaggcacttgtgggccccctggagttccgggtgggcgtgggcttggctggcccgcactcggagcagccggcc

SEQ ID NO: 8814 - DNA, 72 bp, Homo sapiens
tggctcaagggagtcctggcccgggatgcgatcctcgccctagggtctattgcaaccacacaaacccggaca

SEQ ID NO: 8815 - DNA, 72 bp, Homo sapiens
tccttgaggccccaaccacatgagtggtgccagcccggctccccaaggcccagctgatgtcacctaggcaga

SEQ ID NO: 8816 - DNA, 72 bp, Homo sapiens
agaatttggttttttttctaagtctcatttttacccgtagcttctgtttttacagcaaaaggtaaagagtgg

SEQ ID NO: 8817 - DNA, 72 bp, Homo sapiens
ggagaggaggggctgctcagggagctggggtcctccggattccatccacagcagggccagactctccccagg

SEQ ID NO: 8818 - DNA, 72 bp, Homo sapiens
gagggcggtcaactactgtttttgcgacttctctgcgactctaacacgatcagaaagaaggatgtgagcgga

SEQ ID NO: 8819 - DNA, 72 bp, Homo sapiens
tttctggacctgagcgtctccaggagaaatctcgacggttcccagaagcagttatttgtgtacccagggagt

SEQ ID NO: 8820 - DNA, 72 bp, Homo sapiens
gagtaggggcaatgtgcagaactgcttaaccccagcgcctaggcctaaccactgtgccccgccccatgagcc

SEQ ID NO: 8821 - DNA, 72 bp, Homo sapiens
tccctggtcaccaagtctgcccactaagctccccccgacccctgcaggctgtcacatgactcattgagtagt

SEQ ID NO: 8822 - DNA, 72 bp, Homo sapiens
ttctccaaggtctgaattagcaattcacccatctccgccttcattctcccaggtgtcacaatccacctcctc

SEQ ID NO: 8823 - DNA, 72 bp, Homo sapiens
tgatgaggcgctcctcgcgttccttccggtaaccgcgttgcgaagaccacgctgccgggttgcaaacttggg

SEQ ID NO: 8824 - DNA, 72 bp, Homo sapiens
gcagctaaggctaggcctgggaggcagcaagagaacgaccgggctcgcaggcaccccgggatgctcaggcaa

SEQ ID NO: 8825 - DNA, 72 bp, Homo sapiens
tagcccatcggtagcccagagacccaaactgtgtccgatgtgagtgaaggtcaccccagatcagtgcgtcag

SEQ ID NO: 8826 - DNA, 72 bp, Homo sapiens
ctggcaggtcccgggcctgcaccacctggaggagccggtgactcacggggctgacagaagaactgaaaccag

SEQ ID NO: 8827 - DNA, 72 bp, Homo sapiens
agggcatggggccagggtggcagcccccagggagccggcaggatggcagagggcaaggcgggcagcacagcc

SEQ ID NO: 8828 - DNA, 72 bp, Homo sapiens
atgaatgactgagtcaatcaatcagttgctacatccgagccaaaactgttttctccagcaacacataatggc

SEQ ID NO: 8829 - DNA, 72 bp, Homo sapiens
ggtgccccactgtgtttcctgaaatccttgggagccggatctccccatctcccctactcactcttccctttt

SEQ ID NO: 8830 - DNA, 72 bp, Homo sapiens
ccagcgcagtcagaggcctgtcagcatttcagctccgcgcggcgggccctgcggcctccttcagcacctggg

SEQ ID NO: 8831 - DNA, 72 bp, Homo sapiens
tcggcctcttcacacaggggaacgccactcggcagcgaaagaggaggaagtgctgacacacccacagcatgg

SEQ ID NO: 8832 - DNA, 72 bp, Homo sapiens
ctggatacactctgtcgactcctgggctctccctccggcagcccagtgatgtttcaaagcccaaggtcccca

SEQ ID NO: 8833 - DNA, 72 bp, Homo sapiens
gagttctactaaatgcctgagcagtgacacagtgccgctgaaattaaacggattccaaaaacgacaggaagc

SEQ ID NO: 8834 - DNA, 72 bp, Homo sapiens
aaggacgaacgagatctgacaggtgaagagtggttcgaagtgagatgagcaaagggctagaggtgagaatgc

SEQ ID NO: 8835 - DNA, 72 bp, Homo sapiens
ttcaggaagtctgtttccccagtggcctgcaggctcggggatcctcagtgcaagcccaacatctcacatcgc

SEQ ID NO: 8836 - DNA, 72 bp, Homo sapiens
gcggtgccgacgcaacgccgacgtatggtgccaagcgaactttaaaaagctgcttcggacaaaccagagcca

SEQ ID NO: 8837 - DNA, 72 bp, Homo sapiens
gcgtagttccacgttctccaactgtcgcttcggggcgacccttcgacccgggttcaagcccccatgttgggc

SEQ ID NO: 8838 - DNA, 72 bp, Homo sapiens
ctctctcacatggcgccgtgtctagttatctcacacgtggcgtcgtgtctagttccctcacacatggcgttg

SEQ ID NO: 8839 - DNA, 72 bp, Homo sapiens
cagtaaccttttattcctcacactgccttctcaggcgtggcttttgtccaaattatggggcaggtcaagctc

SEQ ID NO: 8840 - DNA, 72 bp, Homo sapiens
gtcaataaaaatagcctaagcgactccctttcacccgccccatctgccacaggcttgcctattgcctctgag

SEQ ID NO: 8841 - DNA, 72 bp, Homo sapiens
ctgaggcccagagcaggagtccaggctcatagagccggcctggcagaggaggggtgggggagttgcgtcccc

SEQ ID NO: 8842 - DNA, 72 bp, Homo sapiens
tgaaataaaggggtgggaccagatgctctttgagccgctccagtgtcaccctgtctggcttaggggctcttg

SEQ ID NO: 8843 - DNA, 72 bp, Homo sapiens
ctcatttcatcctcagagcagtcagatgaggtaaccgggtggagaggagggaaggggccctcggggggcact

SEQ ID NO: 8844 - DNA, 72 bp, Homo sapiens
aagctgggagggaagaggactgacttcctggcagccggggctccggttcctgattcctgccctggtatcctg

SEQ ID NO: 8845 - DNA, 72 bp, Homo sapiens
gtttaaaaagaaagcaaagaaacaaacgcaaaacccgaaaccgcatcctccaccgcaaaggtactcggatgg

SEQ ID NO: 8846 - DNA, 72 bp, Homo sapiens
gcctcagacacctgatcctggcctgtccggagggccgtcctgttggcagccagccccagtgctccccagagc

SEQ ID NO: 8847 - DNA, 72 bp, Homo sapiens
aggagcccattgtcctttaaacagcaccgtttaagcggtccttaaggtccctggggagcccacaaaagccaa

SEQ ID NO: 8848 - DNA, 72 bp, Homo sapiens
tggttggcttctgcctccagttgccaggaacctgccgtgtgcccttgatgggtggtgttccttctctgggct

SEQ ID NO: 8849 - DNA, 72 bp, Homo sapiens
cgacataggaagaaggaggagtgccatcagcaaaccgaaacaaacatgggtccactagtgtgcccagggctt

SEQ ID NO: 8850 - DNA, 72 bp, Homo sapiens
ctgacagggtggcttttattttggaagtgtgaggacgcactggacggtcgccacatggggatttctggttga

SEQ ID NO: 8851 - DNA, 72 bp, Homo sapiens
ccttctgagtgttgctcaatgcttagatactgctccgtgtggtctcacgcagtgctttgagcaacacatcga

SEQ ID NO: 8852 - DNA, 72 bp, Homo sapiens
gcgcaggacaggggtgcagtgcaccgtgcgcaagccgaagcagggcgaggcattgcctcactcgggaagcac

SEQ ID NO: 8853 - DNA, 72 bp, Homo sapiens
tgctggacttctttattgatgaagttgatctcgtccgtagctcccggggttaggaatcggcctgctttaggt

SEQ ID NO: 8854 - DNA, 72 bp, Homo sapiens
taaacccaaaaggggacggtgaagccacacgcggccgcccttctcaggagcccacttccacctctcgcaggc

SEQ ID NO: 8855 - DNA, 72 bp, Homo sapiens
tcctcttctttctttttcggtggagtggagagttccgtttatgttaaaacattacccaatcaacagttcaaa

SEQ ID NO: 8856 - DNA, 72 bp, Homo sapiens
taacaggccacgggccccgggctcaggccactgcacggacccagggaacgggctgacagtccagcagaggcc

SEQ ID NO: 8857 - DNA, 72 bp, Homo sapiens
caatgctcagccgttgggttgggggaaacagtgctcggcggaaagacgctgcctcaggaggccccacaatgc

SEQ ID NO: 8858 - DNA, 72 bp, Homo sapiens
tgaggaagaaatctgtaatacagcattaacctgtacgtccctgccagccagagattataaacttgtacaggc

SEQ ID NO: 8859 - DNA, 72 bp, Homo sapiens
attggataaatttggttagatttatcatttcttttcgcaggaaaacacagcagcaagaaagtgtatttctaa

SEQ ID NO: 8860 - DNA, 72 bp, Homo sapiens
gccggggccgggacttggggggcggggctggggggcgcacctccgggtaactgtagtggcctggtgctgcca

SEQ ID NO: 8861 - DNA, 72 bp, Homo sapiens
ctctctggcagaatgcccttctgcctgcagggttccggcagaagaaccagacatcaaagtccaccacagggc

SEQ ID NO: 8862 - DNA, 72 bp, Homo sapiens
ctccctgaccccacgctgttcccacgcccagctctcgggctgaaggcgaattaaggaagcctcctgcacagg

SEQ ID NO: 8863 - DNA, 72 bp, Homo sapiens
tcgcgagggtcggctttccctgggtctccgccctacgggagacagtgaaggcgggagcaaggccccaaccga

SEQ ID NO: 8864 - DNA, 72 bp, Homo sapiens
atcttgtccccaagctagacattaccaccgccatccgcctagatcctggaggagaagacaagcccacattgt

SEQ ID NO: 8865 - DNA, 72 bp, Homo sapiens
aattttatattatttgcgtcatacatttcctgtaacggaagtgttaattttactgtactttttggtaccttt

SEQ ID NO: 8866 - DNA, 72 bp, Homo sapiens
ttacagctggagttcccacccagtgagcagccaaacgggatttgaaccaggcagtttctcagcagagccttg

SEQ ID NO: 8867 - DNA, 72 bp, Homo sapiens
ctccctcccttcagcttcctgctgcacagaaccctcgcccctggccaccccgtgctgcctccttgccctggc

SEQ ID NO: 8868 - DNA, 72 bp, Homo sapiens
cccaggtcaggcttctccgtggccaaagaggtgcccggctgagccctgccgcctgctggtgtctcagctgca

SEQ ID NO: 8869 - DNA, 72 bp, Homo sapiens
atgtatggtacagaggtaggctagaccgcggcgttcgattggatggctatggtagccaatcagaaaaagaac

SEQ ID NO: 8870 - DNA, 72 bp, Homo sapiens
agagaggtattgagcaactttgtaagtttccattacgtgaatgcctagatgtgtagtgatagcatcaggtga

SEQ ID NO: 8871 - DNA, 72 bp, Homo sapiens
cactccttcaataaacgtggctgctggccagaggacgtgagcgtgtgacgggcgccttggcgccacctgttg

SEQ ID NO: 8872 - DNA, 72 bp, Homo sapiens
cgggggtgggagctgacgcaggcggcgggtgcagccgccagactcggagccggggaggcccatgccagcagc

SEQ ID NO: 8873 - DNA, 72 bp, Homo sapiens
ctgtttgcctcagagctcctcatcctggacgccctcgccagagggttcatgttatggtttcctgcataagcg

SEQ ID NO: 8874 - DNA, 72 bp, Homo sapiens
gtgaggttcagatttcgtcacatatgtaaagcatacgccactgtacaaaaaacccagttccaattcagtaca

SEQ ID NO: 8875 - DNA, 72 bp, Homo sapiens
tgagtggggaggggttgagcctctgggccacagaccgcaggtgctgactcatggcctctgctgggcgatata

SEQ ID NO: 8876 - DNA, 72 bp, Homo sapiens
ttccataaccacccgagcaatactaaccatgggtccgagacgttctaattgtcgccgcctccgcggcgaata

SEQ ID NO: 8877 - DNA, 72 bp, Homo sapiens
cttggaggaagggggagctgtattttctgagtggccgcacttcctggcctagacgtgtgtgtcttgctgtaa

SEQ ID NO: 8878 - DNA, 72 bp, Homo sapiens
actcccttgctgtgaaagacctctcaggggagaaccgacattgaagcaaaacaatgatttcatccctcccgc

SEQ ID NO: 8879 - DNA, 72 bp, Homo sapiens
cgttttcaggaaccgctcagcccctctgagtgccccgcagatggacctggcggcgttcctggctacggctga

SEQ ID NO: 8880 - DNA, 72 bp, Homo sapiens
gctgaggcccctactctcccgggccccagtttagacgaatgggctataggcagaacacacacggccagggtt

SEQ ID NO: 8881 - DNA, 72 bp, Homo sapiens
gaactaaggccagagagcctcaagtcagggcttttcgctgacctggaggcagaatccagtttggggttttgc

SEQ ID NO: 8882 - DNA, 72 bp, Homo sapiens
cagctgaaactcaaagctgatctgttttcacattccgctcatgcgggcttcagagccacacaatttcacttt

SEQ ID NO: 8883 - DNA, 72 bp, Homo sapiens
ccatcgacctctgggttatgggcccagcacgcttccgctgcgccactctgctacgcgagtcacaggtcccag

SEQ ID NO: 8884 - DNA, 72 bp, Homo sapiens
ggaccaggaagcccgggctggccctgcagaagcaacgagaaaggctcagaggctggggtttccccggctcct

SEQ ID NO: 8885 - DNA, 72 bp, Homo sapiens
atttgtgtgtctgtgtgagagagagggagagagcacgcaaaagatggagagactgagaaaaagaaggccaaa

SEQ ID NO: 8886 - DNA, 72 bp, Homo sapiens
tatatcaccgagaagctctggcgcaacgcgttgctcgctggggcggtgccggtggtgctgggcccagaccgt

SEQ ID NO: 8887 - DNA, 72 bp, Homo sapiens
cacctgtgacctcatttctgagagctgcagggaggcgcttcctcagttggactccacttcctctccggggtt

SEQ ID NO: 8888 - DNA, 72 bp, Homo sapiens
cctcaaagtctggatttctatttgtcagccattagcgctaggtgaaataaatatcttaagactctgttactt

SEQ ID NO: 8889 - DNA, 72 bp, Homo sapiens
ctggccccctcctcaggccccctcctcggctacctcggccctggggactgggtcccccaccccaccgttgcg

SEQ ID NO: 8890 - DNA, 72 bp, Homo sapiens
atgttctcgggagtgttgttgcgatgactcgcttgcgagtgatctgacggaaggaagggcggctgaggagga

SEQ ID NO: 8891 - DNA, 72 bp, Homo sapiens
ggagacccaaggctggtggctggaaatcctttctgcgctacgtaggacagggcgccctctcctgaacaaagg

SEQ ID NO: 8892 - DNA, 72 bp, Homo sapiens
aggacgctggaggcccagaacagctcaggtgctcccgctgggccggcccgggccgggcgcttcctgggaggg

SEQ ID NO: 8893 - DNA, 72 bp, Homo sapiens
tgtcatgcttatgactcagggcaccaacacttcaacgtctcaaactaaaatgtccttaacatttcaaaattc

SEQ ID NO: 8894 - DNA, 72 bp, Homo sapiens
gcgtctatccttcagtaatgaaaaattactctttccgttattgaagagcagtggaaagtaaactagctttag

SEQ ID NO: 8895 - DNA, 72 bp, Homo sapiens
gcagggcccacgggacccagaaccaggctggactccgtcacagtgctgggtgttttcagtgtggaggggctg

SEQ ID NO: 8896 - DNA, 72 bp, Homo sapiens
cagcctgagcaaggctgcggatcccagaacaagcccgtctgcccaagtttgaggtctggttttaagcagcct

SEQ ID NO: 8897 - DNA, 72 bp, Homo sapiens
ggagtagatgctgctggtctgtgttttcctgtcaccgtgataaaccatcgctggcactcagacccgtggtgc

SEQ ID NO: 8898 - DNA, 72 bp, Homo sapiens
cagagctgttgcttccaccttttgtattatttctacgttgttaattcttttgtaaagtggtttagaccacat

SEQ ID NO: 8899 - DNA, 72 bp, Homo sapiens
ggctcaggtgaagagcggctcgctgccagtcggcacgtttgtacagacccacaaaaagtgacctgaggacgg

SEQ ID NO: 8900 - DNA, 72 bp, Homo sapiens
tccccagaggtcctggtccaggctctggcattggacggaagacccgaggtgggaggcaggaagtggtctctg

SEQ ID NO: 8901 - DNA, 72 bp, Homo sapiens
cttttttttttttttttaaggctttgttaaagaatcgagtgggagggaagattccagaacctgttatccaca

SEQ ID NO: 8902 - DNA, 72 bp, Homo sapiens
caccctcctcttgccaatatgctcaacctccttgccgtttgtccttttaatgcattgccctggccaaagccc

SEQ ID NO: 8903 - DNA, 72 bp, Homo sapiens
aggtcatatcctctatgaaaactggtatgtgcccacgtgactgccttagcatggatttggtgtccctttcca

SEQ ID NO: 8904 - DNA, 72 bp, Homo sapiens
caacaaaagtacgtcgctgactcgaagctgggcggcgggtttcagaggctgagttcttaacaccagggcact

SEQ ID NO: 8905 - DNA, 72 bp, Homo sapiens
gtcaaccctgccaagcacagtactctggaattttacgtcctctaatcctgaagaagcagggtactgggggaa

SEQ ID NO: 8906 - DNA, 72 bp, Homo sapiens
gctctcacgctccactagccactccttagcaggaacgtgggcacgagaattcccaaacttcctcgagtcagt

SEQ ID NO: 8907 - DNA, 72 bp, Homo sapiens
gctggaagccgtcggggagttccgccaccgttctccgagcaggtctctgtcggtccccaaccggcctcggcc

SEQ ID NO: 8908 - DNA, 72 bp, Homo sapiens
tagcccaggggaagggcatggctggcactgtggtacggggatccagggtgtggacaggccctcccacctggc

SEQ ID NO: 8909 - DNA, 72 bp, Homo sapiens
gcagctgaggccaggcgaggattcgagcacagcgccggcgggctggcactgctgggggactcggcgcaccct

SEQ ID NO: 8910 - DNA, 72 bp, Homo sapiens
tcctctgccctgctgtccctctgccccatctatcccgcaggagcccccttgagcctgtcatcctgcctggtt

SEQ ID NO: 8911 - DNA, 72 bp, Homo sapiens
gtgaagttacacctgagcgtggtcgttgtgaagaacggtctgtccaggaactcccgagaacgtgtggtcggc

SEQ ID NO: 8912 - DNA, 72 bp, Homo sapiens
ctgggattacaggcgtcagccaccgcgtccgaccccggccccctagttatgaaaaccaagtatgtctccaga

SEQ ID NO: 8913 - DNA, 72 bp, Homo sapiens
cagacagaaacacatcacgactcctgaaggaatgccgatcatcagagcagactgcatgcatgactcattcac

SEQ ID NO: 8914 - DNA, 72 bp, Homo sapiens
ctgatgatttcatcactagctggaagcatcaggatcgaaacgatgacagttgcaaaatgttcatcaagtgag

SEQ ID NO: 8915 - DNA, 72 bp, Homo sapiens
tcacagatattgcttttttacaaatggaatgttcacggaactctgtgtagagcaagtctgttgttgccattt

SEQ ID NO: 8916 - DNA, 72 bp, Homo sapiens
gaaataatcctgttggctaggactccagaactgtacggatgagaaaaggatgcaggaaattctgttgtttac

SEQ ID NO: 8917 - DNA, 72 bp, Homo sapiens
ctgaaaaccatctgcctactaccatctctctggaacgtctccttgtccccagatgtgactattgttcttaat

SEQ ID NO: 8918 - DNA, 72 bp, Homo sapiens
acttgattgggagatgaggtaattacaaaacaaaacgaagcaatttgcaatccagcctgtaccagagcagtt

SEQ ID NO: 8919 - DNA, 72 bp, Homo sapiens
ctggcaaccagctctgtagatttaataaagcaccacgttggccatgtctatagaattaagaggaaaagaagg

SEQ ID NO: 8920 - DNA, 72 bp, Homo sapiens
agatcagcacctgcggttgtctccaccccaacccccggcctttgcaggcacagcgccctccaccagatactc

SEQ ID NO: 8921 - DNA, 72 bp, Homo sapiens
gggagaagtcactgtggtttgaaagtacataacagcgctctgacttagccagggcaatcaaggaaggcttcc

SEQ ID NO: 8922 - DNA, 72 bp, Homo sapiens
atcctgtgtcctacacaacaggacaaaggccaagtcgttctgtgagccaattcagcaaacaaaggcacttct

SEQ ID NO: 8923 - DNA, 72 bp, Homo sapiens
ttaaattccttgtccaagtcacatggcttgaaccacgtagaacccacatccatctaaatgcagagcctgcac

SEQ ID NO: 8924 - DNA, 72 bp, Homo sapiens
ccagaggtaggacgcagcttttctctctgaacccgcgcagcggcagcttgatcaccgcgggcaggatagacc

SEQ ID NO: 8925 - DNA, 72 bp, Homo sapiens
tcctcttcagtccctctgtccctgcccaggtgcagcgagaagtagagaacatgctagaaacaaggcccccaa

SEQ ID NO: 8926 - DNA, 72 bp, Homo sapiens
ggtgccaagctcggggatgaaggggaagctgcaatcgctggggttcatgcctcactacactccgggctctgc

SEQ ID NO: 8927 - DNA, 72 bp, Homo sapiens
aatgcctgaagcccttgtactttgctcccccgaatcgcaggcatttctgtgccgtcccgcccctgggcattt

SEQ ID NO: 8928 - DNA, 72 bp, Homo sapiens
ccatcagtcctatttatggtgtgcccgcaccatgccgggcattctgctaaagcatcatccccagttacctca

SEQ ID NO: 8929 - DNA, 72 bp, Homo sapiens
tgactccagcatggctttcctctccaggacgtcaccggtggcagctgcttccttccagagccggcaggcagg

SEQ ID NO: 8930 - DNA, 72 bp, Homo sapiens
tctggaagtctagcttctgccttaacccttcaccacgaaactgggagtaaggatcttccctagggttccaag

SEQ ID NO: 8931 - DNA, 72 bp, Homo sapiens
atcttcctccctggtatctttaacgtcttcctccccggccagtgtcgggtcttcctcgctggtgtccacacc

SEQ ID NO: 8932 - DNA, 72 bp, Homo sapiens
gtgttctggttccccctttcctgcatgaggcagtacgagtaccctggcctggctttgggttctacacggtct

SEQ ID NO: 8933 - DNA, 72 bp, Homo sapiens
cggcctccgcctttattagtgctgaccacgcctcccggataacggtgacaaccccgcggcccaatccatgcc

SEQ ID NO: 8934 - DNA, 72 bp, Homo sapiens
tttttgtttgtctctctctgtgtgtgtatcaataacgaggagggaacatagacatcaaaatcccaggtaatg

SEQ ID NO: 8935 - DNA, 72 bp, Homo sapiens
ctctcactggcacgctggcactcgccgggactttgcgtcacccagcctgggcactccggtagcccagaagga

SEQ ID NO: 8936 - DNA, 72 bp, Homo sapiens
agccaccatttccaaactacacaaacttagtttcacgtgatcttgtagtgatactgagtattttttaattta

SEQ ID NO: 8937 - DNA, 72 bp, Homo sapiens
agttgatagccttcacctggtcccgagtcaggccccggtacctgatgcccccttcccagggcgggtgtatga

SEQ ID NO: 8938 - DNA, 72 bp, Homo sapiens
cagtgcctagaagtctgacgattctaaattgtccacgccaaattttgcaacaaaatttcactaataatgatg

SEQ ID NO: 8939 - DNA, 72 bp, Homo sapiens
ctaacagaatgtcaccgacgaagcagcttaaacaacggaaatgtattttctcacatttctagaggctgcaag

SEQ ID NO: 8940 - DNA, 72 bp, Homo sapiens
tggtggttgtggggagacacgggagagctgcacaccgtgccccttgcctggcgctgctgggcttcccacaaa

SEQ ID NO: 8941 - DNA, 72 bp, Homo sapiens
cagattacattctggtcttggcgaagccagcctgacggtggttcctgcattcacatgaaatttgacttgtat

SEQ ID NO: 8942 - DNA, 72 bp, Homo sapiens
caggtctgttccagcaccaggccagccccacaaagcgccaggcttcaggcttgtcccacagcctcaggcttc

SEQ ID NO: 8943 - DNA, 72 bp, Homo sapiens
cctgccttgccaaaagccacagggcctgaacaacccgagcatctccagaagcagcctgtgcgatgggagcac

SEQ ID NO: 8944 - DNA, 72 bp, Homo sapiens
agaaacaggctgaggtaatgctttgcttcatgtggcggcagagtctgttgataccagagggatcgagcaaag

SEQ ID NO: 8945 - DNA, 72 bp, Homo sapiens
tgaaaaggtgcctgctgcatcatgctcccttaggccggagacagccccaggaagctccaacacagacaaaca

SEQ ID NO: 8946 - DNA, 72 bp, Homo sapiens
tagaggcaggttcaaggacaaaggcccaccttgtgcgggccaaccaagtctccctagtcctcttcgctaggg

SEQ ID NO: 8947 - DNA, 72 bp, Homo sapiens
ggcacttgagctcgtctcccagagctgcacggtcacggctgggctggttttcatcatcagcagagggaggga

SEQ ID NO: 8948 - DNA, 72 bp, Homo sapiens
tggagggagggatcggttggagggagggatccggccgggacctgccctcgcagtttccgcaggttacgtacg

SEQ ID NO: 8949 - DNA, 72 bp, Homo sapiens
acaaagacgagtgaattacatcatatccacaaagacgagtgaattacgtcatatccacaagatgagtgaatt

SEQ ID NO: 8950 - DNA, 72 bp, Homo sapiens
tggacatttcttaacagcagggccaccaggcagagcgggacagccaggaggaagggcagcttggcagagcct

SEQ ID NO: 8951 - DNA, 72 bp, Homo sapiens
cccccactctttctaagtatgctttagtgagtccccggcctgcagtcaccaggccactattccacaatttac

SEQ ID NO: 8952 - DNA, 72 bp, Homo sapiens
ggtctctgtcacaactgctaaccctgctgagccaccgtaggtaatacaagagtgaattagcctggctgtgtt

SEQ ID NO: 8953 - DNA, 72 bp, Homo sapiens
gtgcctgttcccattgcttggcctctgctagctcccggcccccgcacggatctcgaagtggggttggggcct

SEQ ID NO: 8954 - DNA, 72 bp, Homo sapiens
ggagggcttcagggaagctcaccaaggcagaagggcgggagagattgtcagagccccagctggtgtccaggg

SEQ ID NO: 8955 - DNA, 72 bp, Homo sapiens
tttcaggaagcagagatgtttctgtattggggggacggtccctgtgttcctcattcagtgggcacagtggca

SEQ ID NO: 8956 - DNA, 72 bp, Homo sapiens
tttgggaggagtgagagcattggtaaaccctgcttcgaggattccttagggaggaaaggtaggttgcaaaac

SEQ ID NO: 8957 - DNA, 72 bp, Homo sapiens
tgtcaatgttaaccatttatatcccgggcacacctcggaaataggttggatcaacttacatatgtttgttac

SEQ ID NO: 8958 - DNA, 72 bp, Homo sapiens
agtgcaccatggtattttctccaacagtgcatactcgtaacctaacaaatcttgaggtgggtcctataaaac

SEQ ID NO: 8959 - DNA, 72 bp, Homo sapiens
tggaagtgggcatggagggtcctacgcatccccagcgggggtctgagggcccactgttgctcagctggggga

SEQ ID NO: 8960 - DNA, 72 bp, Homo sapiens
gaacttctgcccttgggtgaccaacaccattaggacgcgggtcaaaaggttgtagtgtgacagaaaatgcag

SEQ ID NO: 8961 - DNA, 72 bp, Homo sapiens
gaaatgtgggaaaccttgcttgaaatgggtttggccgggaaacagcatggtggaaggagtgtggctttggaa

SEQ ID NO: 8962 - DNA, 72 bp, Homo sapiens
tccagacaaaaattagcttccttgtagttcttcaacgtgccaggcatccgctcacctcaagggctttgtact

SEQ ID NO: 8963 - DNA, 72 bp, Homo sapiens
tcaccaccccttaaccttgcccacatccctgcaagcggtccttcactacatgctcctgagacacccagtttg

SEQ ID NO: 8964 - DNA, 72 bp, Homo sapiens
gcccagctgggtactgaggtccaggcagggaaccccgagggctctatcaggcctggggctatttgaaggaac

SEQ ID NO: 8965 - DNA, 72 bp, Homo sapiens
aaagcagagggtctcagccaccagatcgctatgtccggggtaggtcacagcctttgtatcttctcctccctc

SEQ ID NO: 8966 - DNA, 72 bp, Homo sapiens
gggaaccagggctgcgggcggcgcttgcgggccagcgggagttccgggtgggcgtggccttggcgagctctg

SEQ ID NO: 8967 - DNA, 72 bp, Homo sapiens
gcgggccatggcggatgtccccggggcacagcgagcggttcctggtgacggcccagagccccgggaccccct

SEQ ID NO: 8968 - DNA, 72 bp, Homo sapiens
gaacttgaagatgagtcatccaggagaggggtttgcgtgaggtcggtgacttccatgtgaaaaatttaacat

SEQ ID NO: 8969 - DNA, 72 bp, Homo sapiens
cagctacagaatgcctcagtaatgctctattaacccgccagccttcctttcagctacagaatgcctcagtaa

SEQ ID NO: 8970 - DNA, 72 bp, Homo sapiens
tatttctggatgtcaatatggctgctgttctgcaacgtgcctctgctcccaaaaatattacctatctttttt

SEQ ID NO: 8971 - DNA, 72 bp, Homo sapiens
ctccccagttcctcttgtctgtagggtgggcaaggcggctgactcctactcctgagttaccacaagtcagct

SEQ ID NO: 8972 - DNA, 72 bp, Homo sapiens
tcaggtttctccaccgtaagatcctttttccacaccgcgctcctgggaagaaagtcagaaagtgcagccctt

SEQ ID NO: 8973 - DNA, 72 bp, Homo sapiens
ccagggattccacgtcccccttcccccacccggtccggcgcagggcctgttgaaaaggcactagcttccagg

SEQ ID NO: 8974 - DNA, 72 bp, Homo sapiens
ctttctcgaaggagagagaagtaatccttttccatcgtatttgcttataagaccttgggacaaggaagcctt

SEQ ID NO: 8975 - DNA, 72 bp, Homo sapiens
caagtgtctgatttcctgctgggttctaagtttcacgcgagcaaggacctggcctgtcttgttaatggactg

SEQ ID NO: 8976 - DNA, 72 bp, Homo sapiens
agggctgcgtgaactttagtcacgtggtgacaggccgagtcaccatgccaagtcactgtgcgcctccttgct

SEQ ID NO: 8977 - DNA, 72 bp, Homo sapiens
gcttgaggtccttgaggatctggatgacctcgcggcggctggcgtccagctcgcgcgcctcggcggggcccg

SEQ ID NO: 8978 - DNA, 72 bp, Homo sapiens
ctattatttacagggcagtagggaaatgatgtggccgctagctgcagaaagagcaactcatatgaaaaagaa

SEQ ID NO: 8979 - DNA, 72 bp, Homo sapiens
ctccaatgtcccaccctgtggcctggctcccactacgggcagcttctccttggcgggccacggtgaccaggt

SEQ ID NO: 8980 - DNA, 72 bp, Homo sapiens
tcttgcccctttgactttttttcttcctctaggcccggctgccccaagctacaggggagaccttttccatgt

SEQ ID NO: 8981 - DNA, 72 bp, Homo sapiens
gtgcaatgcaagccaattgtttactgtatcttgtccgctcccagagctgcgcccgagctctcgcgttaacta

SEQ ID NO: 8982 - DNA, 72 bp, Homo sapiens
gctcactacccagactacagcagcgcagtgggcagcgcctcagctccttccccttctgctgcctacagcctg

SEQ ID NO: 8983 - DNA, 72 bp, Homo sapiens
agcagaatcctggaaagctacaactgacaagcattcgtctgaccctgggcagatcagtgggcatctatctga

SEQ ID NO: 8984 - DNA, 72 bp, Homo sapiens
gaggctctgaccacagctggcaggctctgtggtaccgcagaggccaatcttcaacaggaagtcttgggggaa

SEQ ID NO: 8985 - DNA, 72 bp, Homo sapiens
cccttcaacaccagccctgacaggaagttctttcacgtatctctctgcaatccttgtgctggccaggccctc

SEQ ID NO: 8986 - DNA, 72 bp, Homo sapiens
ctgctggcatattttcccctggaccacgaacccttcgtacctagtaacttgccacctgtgtttataaatacc

SEQ ID NO: 8987 - DNA, 72 bp, Homo sapiens
tgtgcaaggccagagccatggaccaggggaggcctcggcagctgattggaatagatgcattaagggatccca

SEQ ID NO: 8988 - DNA, 72 bp, Homo sapiens
cctaattcctgcctatcctgccttttctctggctccgtgctggactggccacttcctcttgcctcataccca

SEQ ID NO: 8989 - DNA, 72 bp, Homo sapiens
ggagttgtgtctgtaatcgccctactattcagtggcgagaaataaagtttgcttagaaaagaaacatggtct

SEQ ID NO: 8990 - DNA, 72 bp, Homo sapiens
gttctgctgcagccagagtggtgtgctttcccctgcgatgttagcctcagtcctccccacccccatctcttc

SEQ ID NO: 8991 - DNA, 72 bp, Homo sapiens
cccaacctatattttgtgtgagacatcccatgaggcgacgtggtgcgcgcacctgcagagaagacaccccaa

SEQ ID NO: 8992 - DNA, 72 bp, Homo sapiens
tggctgattgaagaactgctgaatgtggttttgcccgccaaggcagtgcctgtggttctgtgatacagcttc

SEQ ID NO: 8993 - DNA, 72 bp, Homo sapiens
ccaaggcgagcaaacgcccgccccccaccccctgccgccctcgccttatgccgagactttgctgttgaacac

SEQ ID NO: 8994 - DNA, 72 bp, Homo sapiens
atttatttgtatctgttgtagttagtgcttttgcccgtgggtttctggtgggaggagcgagaactaggcagc

SEQ ID NO: 8995 - DNA, 72 bp, Homo sapiens
gctgggtgaggtgaggcaccctgagacttcttcagcgtgctgagctgtgaggagggggctgggcctttggcc

SEQ ID NO: 8996 - DNA, 72 bp, Homo sapiens
tgccctacgggggacaggacccaccaggaggcctgcgcttccccttcaccgacacacgctgctcccgggccc

SEQ ID NO: 8997 - DNA, 72 bp, Homo sapiens
ccaactggcaggagagcagtggattggaaagaagacgaatatgcttagatgaggcatgtgaggcacctgggc

SEQ ID NO: 8998 - DNA, 72 bp, Homo sapiens
agtcaaagatcagacatcaccatccactcctctcacgtaaacagaaagtcaaagaaacatttatgaagtgcc

SEQ ID NO: 8999 - DNA, 72 bp, Homo sapiens
atcaatttttcagcacttttctcatttctcattaccgtcaggcccatgcggctccccgctcaacaccctcct

SEQ ID NO: 9000 - DNA, 72 bp, Homo sapiens
tagagtgtgtggtgggagggagaattggtacacagcgaggcaggaaacagaggaactggggtttcctgctgt

SEQ ID NO: 9001 - DNA, 72 bp, Homo sapiens
ctatccacttcattttttatagttgaagtcaggaccgcatactcaggagaaagatcacttactccattacta

SEQ ID NO: 9002 - DNA, 72 bp, Homo sapiens
gacatcagagaggaagcatttgcaaagtctgatgacggctcacatggactaatgcagaagtgaacccgcagg

SEQ ID NO: 9003 - DNA, 72 bp, Homo sapiens
acctacctcatagttaggaggtttaaatgcggtaacgggtataagtgcatggcatgtactaggtctttaata

SEQ ID NO: 9004 - DNA, 72 bp, Homo sapiens
actcctgggcctgagacggcctcaggatgctgcagcggccttggcatcctcttcagcagggtggcggccgga

SEQ ID NO: 9005 - DNA, 72 bp, Homo sapiens
ggaccattaggtcaagttcctgtctgcttcgtctccgcagagctgaggaactgcgtgtggagtcagcccagt

SEQ ID NO: 9006 - DNA, 72 bp, Homo sapiens
gttagtggccaaggagccggggcccaggagaggcgcggggggtagatgggtggtaagactgggatgtggaga

SEQ ID NO: 9007 - DNA, 72 bp, Homo sapiens
gtagttaatcatgcaagctgctgtgtcactggggccggggtagttaacagttaactcgatggattaaggatc

SEQ ID NO: 9008 - DNA, 72 bp, Homo sapiens
ctccctaattgtctcatttgcagttgtgggtgccacgcctggccccgagtgtgttggggaaggtaaagaacc

SEQ ID NO: 9009 - DNA, 72 bp, Homo sapiens
ctaatacatctgttgccaaagaacttgtactccaacgccaaaatcttacttaatagaaaattaatcagtctt

SEQ ID NO: 9010 - DNA, 72 bp, Homo sapiens
gtgggtaatttgggaatttaggttgatttcatagacgactgaaatgcttgaggcaggaagcagtgaatacca

SEQ ID NO: 9011 - DNA, 72 bp, Homo sapiens
ggcaggagataagttgcagcaaaatcccgttcagccgatcacccaggcaagactcgtcccagtccgactctc

SEQ ID NO: 9012 - DNA, 72 bp, Homo sapiens
aaagggaaataaaggaaagaaagaaatgcactagacgaggtgtcagaagacctgatttagagtatcagttct

SEQ ID NO: 9013 - DNA, 72 bp, Homo sapiens
agggtaattgcgaaattaggggaagggctgaaatacggaaggctcgccgaagatctctaggtagttaataac

SEQ ID NO: 9014 - DNA, 72 bp, Homo sapiens
tacagggaggaaggcatttcctgcctagatgtctccgcccccactgccatggagaccagcttggaagcttag

SEQ ID NO: 9015 - DNA, 72 bp, Homo sapiens
gcccgagcttcccaaatcttgagggaaacgggagccgctgcagggtcaggacgcaaagactccgaggccctt

SEQ ID NO: 9016 - DNA, 72 bp, Homo sapiens
aaggccctggggggcgggcagggggcggccctgagcgtctgggaatccccagggctgggtcgaggctgggac

SEQ ID NO: 9017 - DNA, 72 bp, Homo sapiens
gatgcctgttctccacctacctcgccagcagcctgcgctgcccggcttgccagcttctgggcctgcctaccg

SEQ ID NO: 9018 - DNA, 72 bp, Homo sapiens
gcgtgcaggtggagcagcagcgagggaggcgggggcgttggggtcgccaaggtcacattttctaacccgcgg

SEQ ID NO: 9019 - DNA, 72 bp, Homo sapiens
atctcttactgcacactgcctcctcgccccgcccccgaacccaagccattggttgccgggcaccgccccatt

SEQ ID NO: 9020 - DNA, 72 bp, Homo sapiens
cagaagtccagccagccaggaacccatcccaaccccgggatccagcaggagccttcctcagccctctcccca

SEQ ID NO: 9021 - DNA, 72 bp, Homo sapiens
tcctttttctgctccttctttcattgttggctcaacgtcaaagcagaaatctctaaagtttgctgatcgatc

SEQ ID NO: 9022 - DNA, 72 bp, Homo sapiens
ttatgacttctgtctggctgagggtatacgggattcggacaatgtggtaaggaacaaagcatatgatgtagc

SEQ ID NO: 9023 - DNA, 72 bp, Homo sapiens
aattttttctatttttaacagagttggggtttcaccgtgttagccaggatggtcttgatctcctgacctcgt

SEQ ID NO: 9024 - DNA, 72 bp, Homo sapiens
tctgggctgcaggccaggggtaaagggcctccacacggggtaccgggggtgggggagagtgcctctgaccac

SEQ ID NO: 9025 - DNA, 72 bp, Homo sapiens
gaaacttacagtcatggcataaagggaagcaaacacgtccttcataaggcggcaggagagagaagtatgagg

SEQ ID NO: 9026 - DNA, 72 bp, Homo sapiens
cacctgactggttttcgtattttttttggtggagacggggtttcacgtgttggctgggctgatctccagctc

SEQ ID NO: 9027 - DNA, 72 bp, Homo sapiens
agggagacagtgtggaggccacagggtactcgccacgatgagcagcaccttagctaagatcgcggagataga

SEQ ID NO: 9028 - DNA, 72 bp, Homo sapiens
tgttatccagaagcctatccctatcaattagattacgcttttaaaaagttacaagaaatcaaaatattataa

SEQ ID NO: 9029 - DNA, 72 bp, Homo sapiens
actgccggctcttcccctaactattgtgagtgtctcgcagtcttggctctgctgtttgggacgtgccagggt

SEQ ID NO: 9030 - DNA, 72 bp, Homo sapiens
ctgaggacagttgggacaatgtcctgcaaggcaggcgagagtgcagtgaatgtcagaacaggagggtcacgt

SEQ ID NO: 9031 - DNA, 72 bp, Homo sapiens
ctcatccccatttctttggtccatttccagggtctcggcctatagtagcccctccccactactttgtccttg

SEQ ID NO: 9032 - DNA, 72 bp, Homo sapiens
aggtgtcacccacgaatgttcccatgttcctggggcgtcacgcaggtcccagccacatccaaatgtcccccc

SEQ ID NO: 9033 - DNA, 72 bp, Homo sapiens
gggcgggggcagagcaaagcagccctgccttctcccgaagaagaagggcacgagtcagacacccctgctgtc

SEQ ID NO: 9034 - DNA, 72 bp, Homo sapiens
tgctgggattacaggcatgagccactgcgcccagccgacagtggctatcttcaggaagtgagacaagatgga

SEQ ID NO: 9035 - DNA, 72 bp, Homo sapiens
gagcaacagtagcagcgcccagagcagtagagacccgggtaggcaggaggcgcaggggagcatcctggggct

SEQ ID NO: 9036 - DNA, 72 bp, Homo sapiens
ggaggccatccaggccgtgagagacaagtgaggcgcgggcggccaccctggcggggcgggacaggtgcgggg

SEQ ID NO: 9037 - DNA, 72 bp, Homo sapiens
gcctgccagaaggtctgcaccctaacgccggagtgcgttgatctgtgggtccaaccgctccctggcctgggg

SEQ ID NO: 9038 - DNA, 72 bp, Homo sapiens
ttatatcttgcggttttgtggttaagagaaaatgacgctaccaatgaaaggtccccttttaggcccccaggg

SEQ ID NO: 9039 - DNA, 72 bp, Homo sapiens
tttccaaaagcagagcccgccccacccgcggctcacgtcatctgtgaagatggccagcttcccgctctccag

SEQ ID NO: 9040 - DNA, 72 bp, Homo sapiens
cttttgctgcatttcctgctgcagcactgcaacaccgcaacaccctccctccactgttcaaatgctgacctt

SEQ ID NO: 9041 - DNA, 72 bp, Homo sapiens
cctcagtccagaaaacagcgattttaatttgaaagcgattttatgtatgagaggggaaaggagccccaaaga

SEQ ID NO: 9042 - DNA, 72 bp, Homo sapiens
caggccgggaaagctgaaagcacagtgacctccttcgctctcccaagccgctgggtcgccgctacgcgccga

SEQ ID NO: 9043 - DNA, 72 bp, Homo sapiens
gtctgggcctccttcctgtctctgctctctggtcacgctgtcacttgtagactgttctgcctagaagccatg

SEQ ID NO: 9044 - DNA, 72 bp, Homo sapiens
aggcgggtgggactcagtggtgtgtgtgtgtgcggcgagtgcctgcctgtaggtggccccggccaagccagc

SEQ ID NO: 9045 - DNA, 72 bp, Homo sapiens
ttactgtatttcaccttgcactctctagtttccttcgtgctccctcaatatccaactcttaataaattcatg

SEQ ID NO: 9046 - DNA, 72 bp, Homo sapiens
gccggctcgccactcctcattctgcggcgcccgcacgctggggagcaggggaagaataataatgagtgttag

SEQ ID NO: 9047 - DNA, 72 bp, Homo sapiens
ccgcacagggcggaggggcgacctggatcacacaccgcgcgtgtgccgggctcacgctcaccacgcagggcc

SEQ ID NO: 9048 - DNA, 72 bp, Homo sapiens
acctcagacgggatgcgctctgtggggcaggtccccggctcccacggctgagacccatggcccctagagacc

SEQ ID NO: 9049 - DNA, 72 bp, Homo sapiens
aagttcagcaagaggatttagtgactggcttctaacgaatacatcatggaaaggggaagatttacagtggat

SEQ ID NO: 9050 - DNA, 72 bp, Homo sapiens
ggcccctcacccctcaaacggcagtccagggccagcgtctttctgcgctcacccacctgcctgcgacggggc

SEQ ID NO: 9051 - DNA, 72 bp, Homo sapiens
gatcaaccaagaccaaggagcaaccccctggaggacggctcacaaggccttgtgaaacaaaggaagtttctt

SEQ ID NO: 9052 - DNA, 72 bp, Homo sapiens
ctagctgtttccaagttcctactctgggagcaagccgtacccagcacttcctcttctccctccctgtgtccc

SEQ ID NO: 9053 - DNA, 72 bp, Homo sapiens
gcatcagactgggaagcgaacttaagccagcggtgcgtggcccaggagtgggaaaggaaatggatgcctgaa

SEQ ID NO: 9054 - DNA, 72 bp, Homo sapiens
cctcccttgagggctctgtggctccagtccctaagcgtgcagaaggccacctcttcctgtgccttttgaccc

SEQ ID NO: 9055 - DNA, 72 bp, Homo sapiens
gttgtgaccccagtgtgacctctgcagggagacaccgcgagggctcctccgtggcactggatgaggcgacag

SEQ ID NO: 9056 - DNA, 72 bp, Homo sapiens
cgtggcaaggggacccgcgagaacgttgtcgcctccggaaggaaagggacttgaactcacgacccacgcagc

SEQ ID NO: 9057 - DNA, 72 bp, Homo sapiens
ttagcacagtggttctcagctcagccaaaaccctgcggctggtagggggcctgtggggctgggggctgatgt

SEQ ID NO: 9058 - DNA, 72 bp, Homo sapiens
gggtggggagggggcccacaagcacgcccagcccccgccgaattcttttagcttcgtaattggaacctttga

SEQ ID NO: 9059 - DNA, 72 bp, Homo sapiens
ctggcatttgcttcttacttcctcctgacattgtccgccttgcagattttcataagaaggttcaggcagttg

SEQ ID NO: 9060 - DNA, 72 bp, Homo sapiens
tctagttttgtaacatcttgcccaagagcggtggtcgttaatgtgtggagttgggatgacatccaagtcagt

SEQ ID NO: 9061 - DNA, 72 bp, Homo sapiens
cgcacccagacagcccccaaccctccaacgcgctgcgtttccctgtcctgaagcctgcaacccggtgaccct

SEQ ID NO: 9062 - DNA, 72 bp, Homo sapiens
cagcgaatgagtggcacagccagagattcaagtcccgactctgggctctcagccatcccactctccctcctg

SEQ ID NO: 9063 - DNA, 72 bp, Homo sapiens
ccagtccctggcagaagggaagctgccctaagtctcgctggctgcggcagtcctcctggctgctgagtgact

SEQ ID NO: 9064 - DNA, 72 bp, Homo sapiens
cccttcagacccaccgccaggctgggttatattaccgcggcctgaaccccctcttttctttgtcagtgagtg

SEQ ID NO: 9065 - DNA, 72 bp, Homo sapiens
catgcttttgtgtgcttttgggaagtctgcgtgcacgtggagttgtgtgtattcagggagtgtcttgttgta

SEQ ID NO: 9066 - DNA, 72 bp, Homo sapiens
tggctgacgcttgtaatctcagctactcaggaggccgaggcaggagaatcacttgaacccaggagcggacgt

SEQ ID NO: 9067 - DNA, 72 bp, Homo sapiens
ttgcgtaaccatgctcttactgcattctccacaagcgctttgccacgtgcacccataccattgcgttagtca

SEQ ID NO: 9068 - DNA, 72 bp, Homo sapiens
cacctgggctccgactctgacttttggaagcgaggcggccttaggcttcctggttatcagtttccttttagc

SEQ ID NO: 9069 - DNA, 72 bp, Homo sapiens
cttcggccagttcccttgtggggccaggccctgcccgggagcacaggcaggagaacagctgcctccccgcct

SEQ ID NO: 9070 - DNA, 72 bp, Homo sapiens
ctgacaaaaggagacacatcagctaagggtgatgtcggctagctgaaaatacacactaatctaatctggctg

SEQ ID NO: 9071 - DNA, 72 bp, Homo sapiens
gctgcaaaagtgagactgtcttcacacctctggctcgttgtcttcctggttctggatctctcagttcctctg

SEQ ID NO: 9072 - DNA, 72 bp, Homo sapiens
ggtggctctggccttggggtccggggtttaggtagcgccttgggagccccgaccccagcgttttagcgccgc

SEQ ID NO: 9073 - DNA, 72 bp, Homo sapiens
cgagagcaattccattcctttttcctgagggtcaccggaaggggtggtggaagggggatgtttcgaggaagg

SEQ ID NO: 9074 - DNA, 72 bp, Homo sapiens
aaagggcattcaggtcctgatggcttcgcaggaggcgcacagctgattcctttaatttctgtgccctttcag

SEQ ID NO: 9075 - DNA, 72 bp, Homo sapiens
tgcacgcggcgtggcgtgagaggggccctggcagccggcgcgcccacccctgatccttcgaggcccacgatg

SEQ ID NO: 9076 - DNA, 72 bp, Homo sapiens
ggcgcacagaccactgccagtcctttgctgctttgcgcagcctgtcctccccgccaggagcacccttcccgc

SEQ ID NO: 9077 - DNA, 72 bp, Homo sapiens
tagggcgggtgaaactgagacacggcatgcccacacgcacccccaagcgagaaaaatagtcggtcacgtttc

SEQ ID NO: 9078 - DNA, 72 bp, Homo sapiens
acctgatactcacacccttatgtagtgccctttcccgatgaaccagggttgtgtgtgtgaccaacagaataa

SEQ ID NO: 9079 - DNA, 72 bp, Homo sapiens
tccaacatttattatgaaaaaattcaagtgtaaagcgaagtcgagagaattttacagtggagcagacctcaa

SEQ ID NO: 9080 - DNA, 72 bp, Homo sapiens
gatcgtggggtgggacatgtgggatcccccagaaccgagtctgagggacccaggacaggagaaggcctatgg

SEQ ID NO: 9081 - DNA, 72 bp, Homo sapiens
ccagatcctgggttccacctagaaggaaatctgcccggccagggtgaacggccgcaagtgactggtttcagg

SEQ ID NO: 9082 - DNA, 72 bp, Homo sapiens
caggaaggctgtggagtcacccgaggaaaccgagacgctcctaaatagcctatgtggggaacaaagttccaa

SEQ ID NO: 9083 - DNA, 72 bp, Homo sapiens
ctgccatcagctgtgcttcctcaggccaccggccacggctctaggaggcagaccccaccatcacccccattc

SEQ ID NO: 9084 - DNA, 72 bp, Homo sapiens
aactctggggctgagtggtgctgagtgcgctgattcgggtgcctgatgctatacagttcgcagaattctgcc

SEQ ID NO: 9085 - DNA, 72 bp, Homo sapiens
gagagcgggcggctgcgtgggtctgggccctggcccggggcaggctcctctggcctgcctgccttggctgct

SEQ ID NO: 9086 - DNA, 72 bp, Homo sapiens
gtcaggtgcctgatacgcagtaggtgcttagcaaacggtagctaatactatcatcattgtcattgttattgt

SEQ ID NO: 9087 - DNA, 72 bp, Homo sapiens
aatcactgcagaaaaattacggatctggggtggctcgcctcaaattggagcccagaaggccttgggcccatg

SEQ ID NO: 9088 - DNA, 72 bp, Homo sapiens
ttgccgtcattagagattctcttcccaaagagtgtcggaaaggctgggttatacaaagaaaacaagttgctt

SEQ ID NO: 9089 - DNA, 72 bp, Homo sapiens
ctaagccctggactgatggtctggagtctttaggccgggtcaactatgactcttgacgttgactcattctcc

SEQ ID NO: 9090 - DNA, 72 bp, Homo sapiens
tcctattaatctttaaaaatgcagtccagtgagatcgaccacgaactctttcttgacgctccaattaccatt

SEQ ID NO: 9091 - DNA, 72 bp, Homo sapiens
gctccctggcgatgccatgtcctctcggttcagcgcggccacactcgctctctctgtcaatttcagagcagc

SEQ ID NO: 9092 - DNA, 72 bp, Homo sapiens
gaaaaccaggctaccaaactgtaagaatggaatgacgacaatttttagaaaccacagtgtgtgcacacatag

SEQ ID NO: 9093 - DNA, 72 bp, Homo sapiens
gttagaagttttaaaacatttggaaattctagttgcggcttcagatttcataattcagatgatgcaacagga

SEQ ID NO: 9094 - DNA, 72 bp, Homo sapiens
ccaaggcgcgccacctttggcctgaggattctggccgtgtttggcaaatcatagctgagtagtgaatctgaa

SEQ ID NO: 9095 - DNA, 72 bp, Homo sapiens
taagaaagagtcattaggccgggcacagtggctcacgcctgtaatcccagcactttgggaggcggaggtggg

SEQ ID NO: 9096 - DNA, 72 bp, Homo sapiens
gacattgacaagtggagacaccagaacctccgcgccgacaccgggttatctaccttcgccctgccctgtgga

SEQ ID NO: 9097 - DNA, 72 bp, Homo sapiens
gacactgacatgcctgccctgtatgtgcactgcagcgggttaggggccccaaaacaggtaagcaggaaaagc

SEQ ID NO: 9098 - DNA, 72 bp, Homo sapiens
tatgtggcatgttgtttcctgtgcttccaagaattcgggtcaaggacattggagcgggtgatgggccaatgg

SEQ ID NO: 9099 - DNA, 72 bp, Homo sapiens
gtcggggagtcctttgatcaccatgcagtaaacctcgccaaaatattgtaaatttaaacaaactaaaaccca

SEQ ID NO: 9100 - DNA, 72 bp, Homo sapiens
ggcaccctcacttagtagaaacaagagcagtcacccgtgccgtgtccacgatgacaactgctgcctgctccc

SEQ ID NO: 9101 - DNA, 72 bp, Homo sapiens
gctggttttgcttcagaaatgacctgcaatagtcccgttgctcacgagcgtctcatttcctgctgggcccat

SEQ ID NO: 9102 - DNA, 72 bp, Homo sapiens
gacagttatcaatcagtgccactggtgttattatgcggcagcctgggaggagcggagggagagggcctcagg

SEQ ID NO: 9103 - DNA, 72 bp, Homo sapiens
ccaaatagccctggcagattccccctagacccgcccgcaccatggtcaggcatgcccctcctcatcgctggg

SEQ ID NO: 9104 - DNA, 72 bp, Homo sapiens
gccactggtggagacaagggctattgcttttatttcgtgatctccctgcaggtgaagtaacacaacaaactc

SEQ ID NO: 9105 - DNA, 72 bp, Homo sapiens
aaaagtgccaagatggatggacatatggctgtcgccgcactcccgtgtccaagcgccaaggccgaatgacca

SEQ ID NO: 9106 - DNA, 72 bp, Homo sapiens
gaagaatatgatgtaatcaacctgacctggggctgcgaagcctcagagaaggaagcagcagcgccaagggca

SEQ ID NO: 9107 - DNA, 72 bp, Homo sapiens
gccttcgggtgttgaagcctgagtggtttcggggccgggacgtcctagatctgggctgcaatgtgggccatc

SEQ ID NO: 9108 - DNA, 72 bp, Homo sapiens
tgggtcagcgaggcgtccctcagagaccggaaacgcggacttcagctcgcttgggaaacggcttccattagc

SEQ ID NO: 9109 - DNA, 72 bp, Homo sapiens
cagcaatccttctcagttcccactctgagtgaacccggttcaacttctcgggctaacagagattttaatcga

SEQ ID NO: 9110 - DNA, 72 bp, Homo sapiens
tacattgcacagttttcaaaatttaaaaacaaaaccgaacgctgctctgcggcagccgccgccggttgctgc

SEQ ID NO: 9111 - DNA, 72 bp, Homo sapiens
cgcggcctctctgcaaatcacagcgctagcgctttcgaggaagggagatcagctttattgaacacctactaa

SEQ ID NO: 9112 - DNA, 72 bp, Homo sapiens
ctcttggttgtaaatgaatatcttactgagaaccacgttaaccatgcctgcccctcaaagataggaaaggtt

SEQ ID NO: 9113 - DNA, 72 bp, Homo sapiens
ctatttaagtagccagagtccagcacaagggatggcgctcagtagaccctgcgtgaaggaatgattaaattg

SEQ ID NO: 9114 - DNA, 72 bp, Homo sapiens
tctccagcccccgcagccgctgcgtggagtcctcacgctcttggcgaagcgccactgtgtcctcaagctgtc

SEQ ID NO: 9115 - DNA, 72 bp, Homo sapiens
gccgccacacgcacaactcgtgtattcactgctcacgattcagagtagaaagcgtgaacacgcacgaggaag

SEQ ID NO: 9116 - DNA, 72 bp, Homo sapiens
gttacatctgtgcacactctgtccaacctacccttcgttccaaagggccaggatgtactttttcacaaggtc

SEQ ID NO: 9117 - DNA, 72 bp, Homo sapiens
gggacagatccaaccacctaagactctgaagaagccgccccgccctccccaccgggcctgcctgctccgcag

SEQ ID NO: 9118 - DNA, 72 bp, Homo sapiens
ccaacctgtgcgcccacagataaaggcttcgtgtgcgtggcctggcctcggttctgtaatgacttttgcacc

SEQ ID NO: 9119 - DNA, 72 bp, Homo sapiens
ctttgtgaagctgtagacaggctacataatctccccgagcttcactgtttacattggtgaaacatgtgggtt

SEQ ID NO: 9120 - DNA, 72 bp, Homo sapiens
atcattgggacaattcgtccatccacttctacctccgcctctaacaatgaactccttgtttctgcggtgccc

SEQ ID NO: 9121 - DNA, 72 bp, Homo sapiens
agggggtgccggccagtgtggacggaggggcggggcggggacacgggtgagtcactgcggcaggggcacaag

SEQ ID NO: 9122 - DNA, 72 bp, Homo sapiens
tagaaacattctaggtgctcaatcgcagggcttgtcgaataaatgtacgaatttagcacaaatttcctgtgt

SEQ ID NO: 9123 - DNA, 72 bp, Homo sapiens
tgaccctggtttcctatttcataatacatgatttgcgtcattcatctgggactcttaagtctctgtagagtg

SEQ ID NO: 9124 - DNA, 72 bp, Homo sapiens
tggaacagacttcaaagaaagtaaccatggactatcggcagggctctatctctggggctgggggataagggg

SEQ ID NO: 9125 - DNA, 72 bp, Homo sapiens
catcatggtggcttgtgcctgtgttcccggctacacggtcccagctacccaggaggctgaggtgagaggatc

SEQ ID NO: 9126 - DNA, 72 bp, Homo sapiens
acaaaccacagtttgaggaacacaatgacagaactcgataaaaagggaagaaaccagactgctccagtcatc

SEQ ID NO: 9127 - DNA, 72 bp, Homo sapiens
caacagtaacaggctcaactgctttcacaagctaccggaatttgacattccaggaaatcagcctcagggcct

SEQ ID NO: 9128 - DNA, 72 bp, Homo sapiens
cccgcctcggcctcccaaagtgctgggattacaggcgtgatccaccgcgcccggccagatcgttttaaaata

SEQ ID NO: 9129 - DNA, 72 bp, Homo sapiens
aaaggggcgagtcacctgctggctcacacagcagccgggaccgggattgcaggtgacccacgtggcttcagg

SEQ ID NO: 9130 - DNA, 72 bp, Homo sapiens
atagactgacagatttcgcctgaagaggggaagcccgaccaggtaataaaggagtaagaggaaggatgttaa

SEQ ID NO: 9131 - DNA, 72 bp, Homo sapiens
gctctgcaaactcacaggaagaagaaagcagacctcgctcccttggacagatgcccaagtagtaatggggtt

SEQ ID NO: 9132 - DNA, 72 bp, Homo sapiens
gatcacggccttcttggggcaaaccacagcactgtcgctgtgatctgcggaaacggctccctccactttgcc

SEQ ID NO: 9133 - DNA, 72 bp, Homo sapiens
ggtcagggaggaagctcctcggtatcacccccacccggggttccttggcgtgtgtcctaacgagtccttgga

SEQ ID NO: 9134 - DNA, 72 bp, Homo sapiens
gtgtctggagagaatttaactccaagatcatcccccgtgcactctgaggggctgggacaggatgtggtgccc

SEQ ID NO: 9135 - DNA, 72 bp, Homo sapiens
caataatttttacagttctccttgtggctccaggacgcagctgaagttgtgtctcacttctctagaccctgc

SEQ ID NO: 9136 - DNA, 72 bp, Homo sapiens
atcccagctgcccccatgcagggtgagtggtgccacggcagacacccatgctgggctccccacagacctccg

SEQ ID NO: 9137 - DNA, 72 bp, Homo sapiens
ggtggcccggaggctgggctgggcgagtatctcttcgaaaggctcactctcaagcacgactaagagccttct

SEQ ID NO: 9138 - DNA, 72 bp, Homo sapiens
aaaaacttgttgcaggtgggaggcggggtgtgcagcgggcagcccactcacagaggctggagtgaaggatgt

SEQ ID NO: 9139 - DNA, 72 bp, Homo sapiens
caactctgtaactctgaggccaggttcctggattgcgaaactggagcaagaattagcagcctgcagtttgct

SEQ ID NO: 9140 - DNA, 72 bp, Homo sapiens
atgggaccgggtgctgcagagcagggggcggcgcccgtaggggaggatcgggctcgggcggcgcgggagccc

SEQ ID NO: 9141 - DNA, 72 bp, Homo sapiens
ggctaagtcagctgcctaaggtgtccggcacagggcgggtgccactggaaatcaaaagcaaatctggcggct

SEQ ID NO: 9142 - DNA, 72 bp, Homo sapiens
actggccttgattctgacactacaataggactcctcgcctaggctgcaattttcatatgctgtgaaaagtga

SEQ ID NO: 9143 - DNA, 72 bp, Homo sapiens
tccctcatcggctcactgcatgtttgacaagacaccgtcttgctgtcttccctgctgccctctcttcatgta

SEQ ID NO: 9144 - DNA, 72 bp, Homo sapiens
gtgagtccaccagaatggtgcaagctccccagaagcggggaagccactgatgtcacatcctggattggcact

SEQ ID NO: 9145 - DNA, 72 bp, Homo sapiens
gatgctttgtcagacaaacatggctgcccagcctacgtgagccctgagatcctcaacaccactgggacctac

SEQ ID NO: 9146 - DNA, 72 bp, Homo sapiens
tcccgcctgcgcccagtgttgggtgaagcccggggcgttgggccagccctgcaggttaaaggaagcggggtc

SEQ ID NO: 9147 - DNA, 72 bp, Homo sapiens
tattgagggcctactgggtcgcaatagcagttttccgaaacatggccgactctttgacctcagcaattttac

SEQ ID NO: 9148 - DNA, 72 bp, Homo sapiens
gtgggcagcactggggcgcctttgttcctcgcggccgtctcccaggaccggcttccctctgaatctaaatgg

SEQ ID NO: 9149 - DNA, 72 bp, Homo sapiens
gatatgctgcaagctgctgctaaagctactaacatcgcagcttggccttttaaagaaacatttaaacagaaa

SEQ ID NO: 9150 - DNA, 72 bp, Homo sapiens
ccccacctctcgcctttccctctcctcctgaaattcgttttcttgggggacagtagcatgcattccaacgtt

SEQ ID NO: 9151 - DNA, 72 bp, Homo sapiens
tccaaatccatctttcttcaggtctctgcctaaatcggtctcagagtggccttccctgactatcctcttcaa

SEQ ID NO: 9152 - DNA, 72 bp, Homo sapiens
tcaatacatcaagtgtgatgctgttaaatatgaaccggaaatactgttttgaaagatacatttactaatcac

SEQ ID NO: 9153 - DNA, 72 bp, Homo sapiens
tgttcagtcctgctctcctaccaacccacctttcccggcccaagtcagcgcaccccgccgactccctgccca

SEQ ID NO: 9154 - DNA, 72 bp, Homo sapiens
ttcaatgttgcttggcaacttacaatgtgctattacgaccgtgtctgttattccccatgatgatcctgtgaa

SEQ ID NO: 9155 - DNA, 72 bp, Homo sapiens
actgcctggctccaccacctaccagctgtgttgggcgttactaatctccctataactcagtttcctcagtga

SEQ ID NO: 9156 - DNA, 72 bp, Homo sapiens
caacacttggagggaaggactttctgacgctgttccgctggagtggcctattcttgctagtgatggccgttc

SEQ ID NO: 9157 - DNA, 72 bp, Homo sapiens
tattatctttggtctacccagggcagccaaagaggcgcagagaagaatgacaaggtgcccagcaagcggcag

SEQ ID NO: 9158 - DNA, 72 bp, Homo sapiens
gagtggagaatgtctgagagattgcatcacagtcacgttaacccttggtactgcacagcctaacaggataag

SEQ ID NO: 9159 - DNA, 72 bp, Homo sapiens
ctgaccgctgcgggggcgggctcacacagttcccccgctggcaagttttgtgacttgctttggaaaacccgg

SEQ ID NO: 9160 - DNA, 72 bp, Homo sapiens
ttgatgtggagcaggcaaccacgaattctcagaggcgtgcaacaataaacatttatttctcacacatctgtg

SEQ ID NO: 9161 - DNA, 72 bp, Homo sapiens
tggtgggagccatccagagggaaatctttcaccctcgcaggagaaagactgtggtctacgtttgtatcaggc

SEQ ID NO: 9162 - DNA, 72 bp, Homo sapiens
acctatgtctaagcatagatggagaggaggctaaccgacccctcttggctaaaatgggtcatgctgattcct

SEQ ID NO: 9163 - DNA, 72 bp, Homo sapiens
atggggagggagggacaggtgatgggagtctaggccgagggattctgactaactctgacctggctctggtgg

SEQ ID NO: 9164 - DNA, 72 bp, Homo sapiens
ggtgtctgacagagagggcagggttccccatccttcgggaggcgtagaccaattcatggagcaaacgcatct

SEQ ID NO: 9165 - DNA, 72 bp, Homo sapiens
tgtcaatgcacaggcgtttgtctggcatgtagacacgaggctgtagtagggtcctgtcactccacagctgtg

SEQ ID NO: 9166 - DNA, 72 bp, Homo sapiens
cgttttggtgtacattacacaacagcaatctctgacggtttctgcctccctgagaagaccagcacacaaaca

SEQ ID NO: 9167 - DNA, 72 bp, Homo sapiens
cccccagctatggagaagactccacactctggaaccggatcctggaacgcggcctcccagcctcccacttaa

SEQ ID NO: 9168 - DNA, 72 bp, Homo sapiens
tgtttggaatgactgccaatcttgaaagtagagtccgtgtatctcaagacataaaattagcaaaattcttct

SEQ ID NO: 9169 - DNA, 72 bp, Homo sapiens
agttggcccccgccgctctgtccctctcaggtcttcgtgagctctctggtaactgcaggcacttcctgtgtg

SEQ ID NO: 9170 - DNA, 72 bp, Homo sapiens
gccatattgctcaggctcaggacaaggcctcaggtcgtgggcccagctctgacaggatgtggagtggccagg

SEQ ID NO: 9171 - DNA, 72 bp, Homo sapiens
aaagcgcagacggcagctggctgcttcctctcctccggtggccttattataaaggcaggatgggggagccag

SEQ ID NO: 9172 - DNA, 72 bp, Homo sapiens
gatcttcatagcatagataggcggtaagatcttgacgttgataactgtgaaagactttgatttcacagccaa

SEQ ID NO: 9173 - DNA, 72 bp, Homo sapiens
ggaacatttacattttaagagctgaatcaagaactcgcttatgtcaaagaaagagactagtgagtatccctc

SEQ ID NO: 9174 - DNA, 72 bp, Homo sapiens
caagctctaggcccaaagccacatggcagaaagcacgtctagcaaagcagtggggattgtgcccgggccaaa

SEQ ID NO: 9175 - DNA, 72 bp, Homo sapiens
gacctcgccccaactaatctgactttcgcctccaccggggccaccaaccccatctacaggagccctggggtc

SEQ ID NO: 9176 - DNA, 72 bp, Homo sapiens
tgcacttcctgtggccatgctggtttaacctgttacggcttctcagctttgtttcctgctggctgagctggg

SEQ ID NO: 9177 - DNA, 72 bp, Homo sapiens
gtgggcagaaagatcagggtaggcagagctagggacgcccctgacagacattgagatcacgactcccagaac

SEQ ID NO: 9178 - DNA, 72 bp, Homo sapiens
gaggctcaccgaagacagggcgacatgcgagaaatcgctttgtggcgcatagggcacattccgccaaagata

SEQ ID NO: 9179 - DNA, 72 bp, Homo sapiens
aaattgccctgtgacaggagccagggaaaccacagcggagggctggaggctggggtgctggttttgctggct

SEQ ID NO: 9180 - DNA, 72 bp, Homo sapiens
ttccaatgccagcttcctccatttgaacaaaactacggagctctttgcacttttaattttttcctcttccct

SEQ ID NO: 9181 - DNA, 72 bp, Homo sapiens
tgagctcctcactggagagggtagggagagtctaccgtatctgagaggcaactgaggaaggggcacccttcc

SEQ ID NO: 9182 - DNA, 72 bp, Homo sapiens
tgcccggcagggagagtgaaatagactaagtctgccgctcagctgcctttgtcaagggccagaccctggcct

SEQ ID NO: 9183 - DNA, 72 bp, Homo sapiens
cctgagctcttgggaacctggcctcgtgccctcctcgcccgcagtggctgattgtgggtgttgtgtggggaa

SEQ ID NO: 9184 - DNA, 72 bp, Homo sapiens
gaagcgcaggacttccaccccagaggccattgtggcgggggtgggcaaccctggttgggaaggaaaccggtc

SEQ ID NO: 9185 - DNA, 72 bp, Homo sapiens
acgaaagtgggaagacggtgcctaccccaaagcgtcgtgggaatgaaagtcaatgaagtgacataggaaagg

SEQ ID NO: 9186 - DNA, 72 bp, Homo sapiens
ttgctcagcataaacaagcccaaacactcccccaccgcccattcccctcaaggtgccagtttgctttgaaat

SEQ ID NO: 9187 - DNA, 72 bp, Homo sapiens
atttctcccaagaggccggcagggcagggcacactcgggtggggaagcaagtgaggctgaggctgggcccac

SEQ ID NO: 9188 - DNA, 72 bp, Homo sapiens
ctttcccagagcagtttcggtgttagtggttcaggcgggaattccaatgcaagaaaccagtgaacgaatgag

SEQ ID NO: 9189 - DNA, 72 bp, Homo sapiens
aacttggcaaggtgctgcaatgtaattaagttgctcgtgctcagggtttgtcttaatatccatctagactgg

SEQ ID NO: 9190 - DNA, 72 bp, Homo sapiens
ataactatagatttcacaagggtatttattttagccgcaaacatttcttacaagcaacaacaacaaaatgct

SEQ ID NO: 9191 - DNA, 72 bp, Homo sapiens
gcgattcccaggcccgcgtggtcctcgaaggcccccgtcctcctgcgccatggagaccccggcctcgcgacc

SEQ ID NO: 9192 - DNA, 72 bp, Homo sapiens
tggctccctgggtctctgcagggtggacctatgcccggaggagacccaggggaatccccaggaagcccaggc

SEQ ID NO: 9193 - DNA, 72 bp, Homo sapiens
cctgaccttcttgctctaatgcagctgctgttccccggggcagcgactccccttctctccctcccaagtgcg

SEQ ID NO: 9194 - DNA, 72 bp, Homo sapiens
ccgctgaccatttggaagtggagcgtgcacacaggcggctgtgcggtcatcgtctggcaaacaaatgatggg

SEQ ID NO: 9195 - DNA, 72 bp, Homo sapiens
ctcccccgaccccactgccgtgactcaagcaccttcgatggccccctattacccagaaaataaatatcaaac

SEQ ID NO: 9196 - DNA, 72 bp, Homo sapiens
acccggcattaaaacaaacaaaaacgggccgggcgcggtggctcacagctgtaatcccagcactttgggagg

SEQ ID NO: 9197 - DNA, 72 bp, Homo sapiens
agaactgcagagcatccctctctcccccgttcacccgtgccacgagcacgtgagtgcatccacaggcagcac

SEQ ID NO: 9198 - DNA, 72 bp, Homo sapiens
ggctcggcttggtccggatgcgcgctgtgtccgggcgctcccctcacattgaggaggaggcggcccccaggc

SEQ ID NO: 9199 - DNA, 72 bp, Homo sapiens
ggaatgagctccccgcgttcatgagggctggtttccggcagtggcattgggaggctttgttaacattggttc

SEQ ID NO: 9200 - DNA, 72 bp, Homo sapiens
tctgcaaggggaaccggtggttgcatcctggtccccggccgagtctttcctgtagtttattctcatgctgcc

SEQ ID NO: 9201 - DNA, 72 bp, Homo sapiens
atctgcagacaccatgtggctggcctgttggtggccggggagattacataaagggttggaaagctcacagtc

SEQ ID NO: 9202 - DNA, 72 bp, Homo sapiens
tggctgggctgagtgcccgtctcctaccttcccctcgagctcggtgcgcaatcgtcaccatacagcccccac

SEQ ID NO: 9203 - DNA, 72 bp, Homo sapiens
tccacagttcaatgaccattatgaccaatttcatgcgtcatggaatgctatcctcctacctccctcacaaag

SEQ ID NO: 9204 - DNA, 72 bp, Homo sapiens
tcttctctgctcaataaccttcactggctccccatcgcccacctagcatatctacttcctcagcctggaatc

SEQ ID NO: 9205 - DNA, 72 bp, Homo sapiens
aaagacagttgaaggaaatgaattttgaaacttcacggtgtgccaccctacagtactgccctgacccttaca

SEQ ID NO: 9206 - DNA, 72 bp, Homo sapiens
ccaggccccaggacatcctccttggttggcacccgcggccccaggcctgggtcccgcccgcgcgtcccgcag

SEQ ID NO: 9207 - DNA, 72 bp, Homo sapiens
aggcctaagatgatgggggctcttcccaaccagtgcgcacaggcagctccagcgcgaccccacttcctctcc

SEQ ID NO: 9208 - DNA, 72 bp, Homo sapiens
acaggaacttttcaggaaaacaggctccagattcacgagtgacttgatgagcccagggcatgaacatctcaa

SEQ ID NO: 9209 - DNA, 72 bp, Homo sapiens
tgaaaagatgactctgagtgcactagagacaaatgcgtctggcagcaggaagtccagttaggtggctgtggc

SEQ ID NO: 9210 - DNA, 72 bp, Homo sapiens
gggatgtggtaagaactgctcacccagaaagtgcccgggtgcctgtttccccagagctccctggtgacagtc

SEQ ID NO: 9211 - DNA, 72 bp, Homo sapiens
tctacaaaaacccaaactgtagaaaaacgatttggcgttgtcctgtcctggtgatgggatcctaatagcatc

SEQ ID NO: 9212 - DNA, 72 bp, Homo sapiens
ggaaagcagcttgacttctccttccatcccttccccgctcccaccaacttcatcttttaattcaggggttcc

SEQ ID NO: 9213 - DNA, 72 bp, Homo sapiens
cagacacaaccacaacatggttgtgaccgggcagtcgaaccctcaggatcgacccaagagacatgaaactac

SEQ ID NO: 9214 - DNA, 72 bp, Homo sapiens
tgcagctgtgtgatgcgtggcctcttcctgtgtgccgggctctgtgctccacatttcagtaaaggatctcca

SEQ ID NO: 9215 - DNA, 72 bp, Homo sapiens
ccttccttcctccagtcagcctggatcctctcatccggcagaactgtcgccttgcttctctgaagcggtgaa

SEQ ID NO: 9216 - DNA, 72 bp, Homo sapiens
ctgtttgggacgtgccagggtgcgccaagcctccgcgtatgctcgcgagcccaggcgccttcacgctcccgg

SEQ ID NO: 9217 - DNA, 72 bp, Homo sapiens
attacactgaatccacataggtctagggcttttagcgctgcccacaagaaggcttggggtggtttccaactt

SEQ ID NO: 9218 - DNA, 72 bp, Homo sapiens
agcggttctaagccgctcgagggtggtgcccacgccggcttccaaaacaggcttgagccaaatccacgtcat

SEQ ID NO: 9219 - DNA, 72 bp, Homo sapiens
ggcagtcacaaattaagataagtcataacggaagacgctgtccagttcctgggtgctatgagaggggactaa

SEQ ID NO: 9220 - DNA, 72 bp, Homo sapiens
tgcatagaacctccctttctttgcctgtaggaggccgggggctatgtgaggccatatttggagaatgcagaa

SEQ ID NO: 9221 - DNA, 72 bp, Homo sapiens
ctcctgaacttggaggacagggtcgccgcgagggacgcaggtgggtgcccttgatccagctcagcccgatgg

SEQ ID NO: 9222 - DNA, 72 bp, Homo sapiens
ccgcactccctggggtagggagcggcagggcaagtcgccaggcttgaggcggggggagatcccaacttcctc

SEQ ID NO: 9223 - DNA, 72 bp, Homo sapiens
cggggagaatgtacagacacgcaaagcggtcgggccggcctgtgactcgtgggctctgcaaaaggctttcag

SEQ ID NO: 9224 - DNA, 72 bp, Homo sapiens
cagtgcaagatgagaacaacaaaggtctacaaactcgtcatccacaagaagggctttgggggcagtggtcag

SEQ ID NO: 9225 - DNA, 72 bp, Homo sapiens
cggtttcagttcaggttgcgccctatttaggtctccgggtttcggtgtggaaacaccactccacaagcagcc

SEQ ID NO: 9226 - DNA, 72 bp, Homo sapiens
ggagcccctgtgtgtgcactggactgaaagcccatcgtgctttgctgggcttcttatgcatattagtcctgg

SEQ ID NO: 9227 - DNA, 72 bp, Homo sapiens
aacccagcctccccctcctcacttgagcttcagaccgggccagaaaagctcaacgatgaagaaacaggaaca

SEQ ID NO: 9228 - DNA, 72 bp, Homo sapiens
cagctgcctgctcggaatgcggggccagccgagcccgcacccaccgggaactcgtgctggccagcgagcgcc

SEQ ID NO: 9229 - DNA, 72 bp, Homo sapiens
ggccgctccaagtgcgttgagaagtgtaatccctccgctaagtacttggctctcagtctccaatcactagtg

SEQ ID NO: 9230 - DNA, 72 bp, Homo sapiens
cggaaaggggatgggctgttgggcagatggtgggacgcgtctctggcctgggagcgggctcccccgacacgc

SEQ ID NO: 9231 - DNA, 72 bp, Homo sapiens
gatcgggccgtctcgcctcaccctctcaccaggcccgacacatctgctggccacctttcccggtagacggta

SEQ ID NO: 9232 - DNA, 72 bp, Homo sapiens
ctgtgttgtgttacccaagtagcctgttatctttgcggtttaagggctgacttggaaattcagactgtcatc

SEQ ID NO: 9233 - DNA, 72 bp, Homo sapiens
gagcccactcattcattcagtgaagatttctctcccgatacccacttcaggaacccaggggccatctggaac

SEQ ID NO: 9234 - DNA, 72 bp, Homo sapiens
cccagttctctcctcctctccaggattttttgctgcggtcaccaagcgcaccctacttgggacagggaggtg

SEQ ID NO: 9235 - DNA, 72 bp, Homo sapiens
tcttcatcactactgctgcagttcctgcccatcctcgctctgcattcagcaaaagtgcagtgaagcatgtaa

SEQ ID NO: 9236 - DNA, 72 bp, Homo sapiens
ccccagccggtacaaacagggatggctccgggaagcgtgaggagcagggggagcagagaagtccccaaccct

SEQ ID NO: 9237 - DNA, 72 bp, Homo sapiens
atgccctgagttgcttcccatttcctctttctagccgtccttttctagtgtgtgctcactcttcctaggaac

SEQ ID NO: 9238 - DNA, 72 bp, Homo sapiens
accacagactagttttcaccgtggagcaggaaaggcgcctattagccaggggcaaccggctttgcagacctg

SEQ ID NO: 9239 - DNA, 72 bp, Homo sapiens
acccagtcctccctgctgactccctgtgcaaggggcggggcaggcaatgggtgcacgcatgcgtgtatgaga

SEQ ID NO: 9240 - DNA, 72 bp, Homo sapiens
tctctccctgcattactgaaagtgtcgtggttctacgaattaaagttatataagaagcatgtgagatgctgg

SEQ ID NO: 9241 - DNA, 72 bp, Homo sapiens
ccctaaaagggcctcaaagctcagcagatgggaaccgggattgaaatctgaacatctggctcaggcttttaa

SEQ ID NO: 9242 - DNA, 72 bp, Homo sapiens
tccctctctgtacctggtgggagaaagcgcggcaacgacaccgcctcagcagctctcactcaagggcgtggg

SEQ ID NO: 9243 - DNA, 72 bp, Homo sapiens
tcttcaaaacgaaaggcagaaggggtcaagccatccgggattcagagctaggtaatccacaagaggaaaccc

SEQ ID NO: 9244 - DNA, 72 bp, Homo sapiens
tgtggtggagcactccggctgagcgcgcttcacagcgctgtggcacactggtcatcgttgcttatagaggat

SEQ ID NO: 9245 - DNA, 72 bp, Homo sapiens
cagcatattctaggaactagtaatggggacgcttccgactcgctggggaagggagatgagggcctctagctc

SEQ ID NO: 9246 - DNA, 72 bp, Homo sapiens
acaggtgaacttgagtatttatgtgaagttaaacacgagaatgttgatgatcccaactttgaaatgtttatg

SEQ ID NO: 9247 - DNA, 72 bp, Homo sapiens
tgggactcaggattttcaggagatggaagccatggcggcggggggcgggggtccaggggcagccaagggatg

SEQ ID NO: 9248 - DNA, 72 bp, Homo sapiens
gatgggtaaacagacatggcacctacgtccacagacggatggatggacgaagagacgtggcacctacatcca

SEQ ID NO: 9249 - DNA, 72 bp, Homo sapiens
caccccgccctctccctctctgagagcgagatacccggccagacaccctcacctgcggtgcccagctgccca

SEQ ID NO: 9250 - DNA, 72 bp, Homo sapiens
gcctgagggcctgggggcttccagggatctgcagccgagcggaagaccggtcttgcgtacagcgaggcctac

SEQ ID NO: 9251 - DNA, 72 bp, Homo sapiens
tgccgacgcatgcgcgctggcccaggaattcactccgccagctgcagtcccagcgccgcacagagctgacct

SEQ ID NO: 9252 - DNA, 72 bp, Homo sapiens
gaggggctttgggggggcaaggcctaggaaaaaggcgagcgcagaggaaaaaaaatctatcatagaatatcg

SEQ ID NO: 9253 - DNA, 72 bp, Homo sapiens
gggccacatggagacagggacatgcccaaatggcccgtgctcccagggtagatgaggatcataagtccacag

SEQ ID NO: 9254 - DNA, 72 bp, Homo sapiens
cccgtgggagtgattttcacactgcctgtcagcttcgtgcgatagttaaaaacaatttgcaagtgacatagt

SEQ ID NO: 9255 - DNA, 72 bp, Homo sapiens
gggcctatactcctcagcagcctctccccactgtacgtctctttgcatttggcagcaagggggaatagtttg

SEQ ID NO: 9256 - DNA, 72 bp, Homo sapiens
ggactgagttgaacagcagatcttgccgaggctgccgcttcctgccattcacactgtcccagagaaaccttc

SEQ ID NO: 9257 - DNA, 72 bp, Homo sapiens
aagtatctgccacacccaagatggcagggtgaagccggagaggagtttctcagggaggaaggggaggtgagg

SEQ ID NO: 9258 - DNA, 72 bp, Homo sapiens
gtcagtttccctttgcttcagattcttaatgcagccgaaaggaagtgactcatctggatcacttccctttag

SEQ ID NO: 9259 - DNA, 72 bp, Homo sapiens
tctgtggatgtgcctttcctgacaatatttcttcacgcttgctgcccactggtgctgtgagggcacaataac

SEQ ID NO: 9260 - DNA, 72 bp, Homo sapiens
aacttccctctctccctccctcaggagttagaagccgctcttcacagagatgacgtggagtttatcagtgac

SEQ ID NO: 9261 - DNA, 72 bp, Homo sapiens
actatattggggggaaaacaattgagacctatgctcgttgcatgttgtaatccaggaaaggaatgtggaagt

SEQ ID NO: 9262 - DNA, 72 bp, Homo sapiens
accagagacatgttaagggataaccccactctggccgggaatatgccagccgggaatatgccagccgggaga

SEQ ID NO: 9263 - DNA, 72 bp, Homo sapiens
gggccccaactttacagaagcaggaagcaggttgacgtagtttctcaaatgaaaagatgggtcattttttaa

SEQ ID NO: 9264 - DNA, 72 bp, Homo sapiens
gccggcttcgctagggtgagtggcggcagtatctgcgtccgcagcccccgcagccgcgcgccggcccgcgga

SEQ ID NO: 9265 - DNA, 72 bp, Homo sapiens
acgatgccgctgtccccgccagcccagggcgaccccggggagcccagcccgtgcaggccccctaagaagcac

SEQ ID NO: 9266 - DNA, 72 bp, Homo sapiens
acgggatggactttgtatcttttggctgatctggccggacatccttgcccaataagcacttacccagttgcc

SEQ ID NO: 9267 - DNA, 72 bp, Homo sapiens
tgtgcacttacataatacacatgcacatacgcacacgtgtacgtaacagacgcacatgctgacaaacacaca

SEQ ID NO: 9268 - DNA, 72 bp, Homo sapiens
ttcctttgctccttggttaacagggtctgtctgctcgcattagagaaactgcccagtgactcagatcctgaa

SEQ ID NO: 9269 - DNA, 72 bp, Homo sapiens
agcgctggggctggacccagggttcggggccaaggcgagaagtgggagcggggcccgctttggggacccgga

SEQ ID NO: 9270 - DNA, 72 bp, Homo sapiens
tgcgggagttaatggacctggccttggcgaaggcgcgtcctgggttggatcgaaaccctctcatccgccctg

SEQ ID NO: 9271 - DNA, 72 bp, Homo sapiens
accacttcctctttcttcactctgaagccaagagccgaccttctgagccctcaagaaagatcagaacagatt

SEQ ID NO: 9272 - DNA, 72 bp, Homo sapiens
ctccccagctgggctgttttctaagccgatctctccgtcgtttctactcatcccttaacttctcccttacca

SEQ ID NO: 9273 - DNA, 72 bp, Homo sapiens
ccttctccgagaaacaagggtcagccagattcagtcggcaggccagcagacaagtggaggtgggcggggaat

SEQ ID NO: 9274 - DNA, 72 bp, Homo sapiens
ctgaccccttatccctccttcctgtgcctgcaacacggcttatggtgctgggcctcaggaaatggaggtccc

SEQ ID NO: 9275 - DNA, 72 bp, Homo sapiens
cccagggtcgtggtcttcaatgattgtctggaggacgcatcccatctgtcactcccagaccctcagccttga

SEQ ID NO: 9276 - DNA, 72 bp, Homo sapiens
agtaatgtttaccacaaagcatgtgactttgaattcgacagtctgctgacctcaaccccttcagcccttcca

SEQ ID NO: 9277 - DNA, 72 bp, Homo sapiens
acagacggcacctggaaaatcgggccactcccacccgaatactgcgcttttccaacaggcttaggaaacggc

SEQ ID NO: 9278 - DNA, 72 bp, Homo sapiens
cttgcagggtcttgcgccatccttttgtctgggtgcgtagctgtccagcagctctagcactacctggaagtt

SEQ ID NO: 9279 - DNA, 72 bp, Homo sapiens
ctagcactgtgtatgcatcactcttccttatgccccgtccaccccaccacctggtctccagactcagcagaa

SEQ ID NO: 9280 - DNA, 72 bp, Homo sapiens
aggcgaccgcagccaccccaaccctgggctgctcccgccgttggggagaaagaggcaaggcaaggaagagcc

SEQ ID NO: 9281 - DNA, 72 bp, Homo sapiens
tgaagaccttagacaccgaggcctgaaggcacaggcggagattaagggctcaacccagcaggtgcatcctcc

SEQ ID NO: 9282 - DNA, 72 bp, Homo sapiens
agcccttcagtgtcaatcagcacatgacttacaagcgtccagcacctttctggtgctaaggaggatatagag

SEQ ID NO: 9283 - DNA, 72 bp, Homo sapiens
ctgactgtgctggaggtgacaggctttgcggggtccgcctgtgtgcaggagtcgcaaggtcgctgagcagga

SEQ ID NO: 9284 - DNA, 72 bp, Homo sapiens
tggttaagagtgggcttcgaagctttggctgagctcgtggcgctgttggcctatgcgcctgggctcgcttgt

SEQ ID NO: 9285 - DNA, 72 bp, Homo sapiens
tccgtcttaaaattgtagtggtggaattcatccttcgggatgtattaggtgattcccctaggacgacagctg

SEQ ID NO: 9286 - DNA, 72 bp, Homo sapiens
ccctgcgctgtgtgggcagcgagtccggaaggagacgtccgtggtgcccatgggaggagaggccggtcaggc

SEQ ID NO: 9287 - DNA, 72 bp, Homo sapiens
cttgtcctgggcgcggcgcagccaggcgtccacctcgcggcccagctccccgtcgctcagctgtgcctggct

SEQ ID NO: 9288 - DNA, 72 bp, Homo sapiens
cccagagtgtgcctgttaggtaactggtatgtttacgtggtcccagtgcaagtaaatgtgggtgtgtgtgag

SEQ ID NO: 9289 - DNA, 72 bp, Homo sapiens
ctggaaaggctccagggttggggcctgttttctctcggaagcatttgagagatgttaaagacacagtagcac

SEQ ID NO: 9290 - DNA, 72 bp, Homo sapiens
tagttgtgtgaattccaaactgtcctgaggtgccccggagtgccacagcaaagtcacaaggctggcatggga

SEQ ID NO: 9291 - DNA, 72 bp, Homo sapiens
ggtaggcgtaggatgcgcaggatggagcgcgcatgcgcactggccgccagccgaggacggaagtgggcgtcc

SEQ ID NO: 9292 - DNA, 72 bp, Homo sapiens
ggtttgagcattgctgtcttcccagggcctagaaccgttcctaggcacctagtaggtgctcagtaaattaca

SEQ ID NO: 9293 - DNA, 72 bp, Homo sapiens
catccatgaacgtgaactttttattgtggtttgtccgttccgagcgctccgcagaacagtcctccctgtaag

SEQ ID NO: 9294 - DNA, 72 bp, Homo sapiens
aatttgggctgtgcgagttagcggagcggccgccccggcctgcgcctccgccggctccggctagggggcact

SEQ ID NO: 9295 - DNA, 72 bp, Homo sapiens
ctttgatcctcccactgaatgctgagctggaaagacgaagcaaagctgttcagatgtaattattttaattca

SEQ ID NO: 9296 - DNA, 72 bp, Homo sapiens
acaggaacctggcagccgcactggccgcccagaaacgtcagtggtgctgccccattcggcgaaaggttaggg

SEQ ID NO: 9297 - DNA, 72 bp, Homo sapiens
aggaaatactgattaaagtgtacaagtttcagttacgcaaggtgagtacgttctggtgatcgaatgtacagc

SEQ ID NO: 9298 - DNA, 72 bp, Homo sapiens
tggcccagcccagtttcattcctggaatgggaccccgggagccgagaggggcaagggcctctgggcggcgcg

SEQ ID NO: 9299 - DNA, 72 bp, Homo sapiens
tggcctggtgccctgcaggggacatggcgcttccccgtcccaagggcaacttggagaggacaccatctgtgt

SEQ ID NO: 9300 - DNA, 72 bp, Homo sapiens
tgtggtctatggaggtgcatgggcttcagagacaacgttgatcctgagtccaagccagctgcttagtagatg

SEQ ID NO: 9301 - DNA, 72 bp, Homo sapiens
tccccaggggcggggagctaaggggagagaccaatcgtgaggacagtgctgactcacaggctcagaggggct

SEQ ID NO: 9302 - DNA, 72 bp, Homo sapiens
ggattagaaaggcagagggagagaaaacaaacagacgttcgagatgcatatttgaaagatgggcccacatgt

SEQ ID NO: 9303 - DNA, 72 bp, Homo sapiens
cttagcagggcatttgaggcctctgcacccagcttcgttcatcctttaaggtaggtctcacatggcatgaac

SEQ ID NO: 9304 - DNA, 72 bp, Homo sapiens
accatttacttacaaactttaattcagcaaaggtccgtgtggggagactggggtggggtcgggggaatagtc

SEQ ID NO: 9305 - DNA, 72 bp, Homo sapiens
ggcggggggctctccaccctcgcagggcctgggaacggctcaggggtggccgtggggtgcggccagggcgga

SEQ ID NO: 9306 - DNA, 72 bp, Homo sapiens
agggctggcgatggacaccatctttagggtaattgcgaaattaggggaagggctgaaatacggaaggctcgc

SEQ ID NO: 9307 - DNA, 72 bp, Homo sapiens
aaaagtacctaacacaagcttcctttttgcacaaccggtcctcttggctgaggaggaggagctggtcaccct

SEQ ID NO: 9308 - DNA, 72 bp, Homo sapiens
agagagagctgctctgacctgggcaaagtggccagcgacagtagtgtgcaactaggctccaaagaaaacaat

SEQ ID NO: 9309 - DNA, 72 bp, Homo sapiens
gcaggtcaaatggccatgaggttggaagtcaaatacgaaactcggctgaagtgatgttagaagtttgacaag

SEQ ID NO: 9310 - DNA, 72 bp, Homo sapiens
accctgcaagcccggtggcggcttgtggggctgcccgtccacttgctctttttgcggttctacaagcgtgac

SEQ ID NO: 9311 - DNA, 72 bp, Homo sapiens
agcccaatcagtccccagggtctcggttcccgttgcgcccttccccatggccactgcgctcattcatgagcc

SEQ ID NO: 9312 - DNA, 72 bp, Homo sapiens
catagcacctgccatccagggccctcccagggctgcgtgaactttagtcacgtggtgacaggccgagtcacc

SEQ ID NO: 9313 - DNA, 72 bp, Homo sapiens
ttggagacggaaggtgcacaaatgatcatccctcccgggctgtagttaatcatgcaagctgctgtgtcactg

SEQ ID NO: 9314 - DNA, 72 bp, Homo sapiens
ggttataattatagtgaacttatcacgtggacagacgcaggacttctggttagccagggtgttgtaagcagt

SEQ ID NO: 9315 - DNA, 72 bp, Homo sapiens
ggtgccacttcctttcccatctaaaggggactgctcgcgacccaagccaaggcccgcaagtgtggctctccc

SEQ ID NO: 9316 - DNA, 72 bp, Homo sapiens
tcttgcctcagtctttccttttctctcagattgaccgattgggtcctaaatcacctgcagtgccttggtgat

SEQ ID NO: 9317 - DNA, 72 bp, Homo sapiens
gtcaagcctgcttctgagaggatgtctctgactaacgtctctgacaatcacttgtgctgaggagtcccctgt

SEQ ID NO: 9318 - DNA, 72 bp, Homo sapiens
ggctcagatcccccctaggcctgggctccggaaggcggggagagattgcacaagacgatcttcccatgaacc

SEQ ID NO: 9319 - DNA, 72 bp, Homo sapiens
gtgagccccaagccaagcgggagagacgctcaactcgtgttttagagaagttggccctggagctggagttca

SEQ ID NO: 9320 - DNA, 72 bp, Homo sapiens
ccagcaagaagcccagactttgggaggatttcaggcgacagagtgttgggcagagcaaatgtttcatctgaa

SEQ ID NO: 9321 - DNA, 72 bp, Homo sapiens
tccaacttctgcttcctctctgttccaggcctacccgccgggtccctacgctacacctccggggtacggggc

SEQ ID NO: 9322 - DNA, 72 bp, Homo sapiens
aaatgaggcttcgaatggcatgaagctttctagaccggaaggaaagtctttctcatgggcgatgcagggccc

SEQ ID NO: 9323 - DNA, 72 bp, Homo sapiens
gtcttgggaggggtgtagcgggtcgcaagccttctcgtgacctggacagcggccctcctgggcgagcgctgc

SEQ ID NO: 9324 - DNA, 72 bp, Homo sapiens
aacaaaactgcagccatttgcatcttagtttgaaacgaggctggagatggaagcagggagccacaacgggtc

SEQ ID NO: 9325 - DNA, 72 bp, Homo sapiens
tcgaggctgccccagtcctcctgccaggccctgggcgcccacgcccgccacgggctttcagccgcgggctgc

SEQ ID NO: 9326 - DNA, 72 bp, Homo sapiens
tttcccatcgctgagtgggtcgggggaggcagcgccgaccttaatcacatggtgttaaaaaaaaaaaaataa

SEQ ID NO: 9327 - DNA, 72 bp, Homo sapiens
acccttcccaccaccctttgtccatcccaggattacgttaacccctagtgtgctggaccaaccagagctctg

SEQ ID NO: 9328 - DNA, 72 bp, Homo sapiens
tgggggcatgcagcaattatccatttctcctcccacgctctactgcatacaggaaaaccgaggaaaaatgaa

SEQ ID NO: 9329 - DNA, 72 bp, Homo sapiens
cttctcttcctttaacgcgagcctcaggaactacacgctccttcaccatcattccatgtctacatgacagtg

SEQ ID NO: 9330 - DNA, 72 bp, Homo sapiens
gaggcttggtctccagcggttgaggctggaagcaccggggtgcggtggaaagggctctgtccaggaagaccg

SEQ ID NO: 9331 - DNA, 72 bp, Homo sapiens
tgacatctggcaacatttcatgcctcttcccctttcggttttcatccttgttttctctcccttctcccacga

SEQ ID NO: 9332 - DNA, 72 bp, Homo sapiens
ttagtaatccctcgatttcagccaggactccctgacgacaaagattcatgcatgtgctgtcatcttcactgc

SEQ ID NO: 9333 - DNA, 72 bp, Homo sapiens
aaactgggtgactttgcctgggggcatatgccccacgggagttacatggctttccatgagccaacgacattg

SEQ ID NO: 9334 - DNA, 72 bp, Homo sapiens
caccctctcaggtgttccagaagtaactggagagacgttaagggatggtggaggtggcagacccacaatagc

SEQ ID NO: 9335 - DNA, 72 bp, Homo sapiens
gaggcagctgccaggacctcgctgttcctcaccctcggaagccgtgcctcttctctgggcccttggtctggc

SEQ ID NO: 9336 - DNA, 72 bp, Homo sapiens
caacttgaaacgtcaagagaagcaaataactctcgcggcacctcaggcttggaatctcagaacgggggtgcc

SEQ ID NO: 9337 - DNA, 72 bp, Homo sapiens
ctagagtgtggcagcggcttcggcctgtgctttctcgcctgacaaattgcgaaaggggatgggggttggaga

SEQ ID NO: 9338 - DNA, 72 bp, Homo sapiens
tcctttcctgccggatgtccccactgagtcagactcgtcaaactctcccagcaaccatgacgcacccaggct

SEQ ID NO: 9339 - DNA, 72 bp, Homo sapiens
ctgcgctcacctgggcgaggacttctggccggtgccggggcactctgcatgaccctggcagaatcgagctgc

SEQ ID NO: 9340 - DNA, 72 bp, Homo sapiens
cctgaagcgctgctcggtgtgcacttgaaaatcagcgaaatgctgagcgttgcttcttccctctctccaggg

SEQ ID NO: 9341 - DNA, 72 bp, Homo sapiens
atggaaacgtagctcaaaaggcgacgccaacaccccggagaaaacactgagctactccaaccacagtggcgc

SEQ ID NO: 9342 - DNA, 72 bp, Homo sapiens
tcctgtttgtaagatttgtttacatctttcgtatccgtaagaagtcccacaagcctatgatggttagttatc

SEQ ID NO: 9343 - DNA, 72 bp, Homo sapiens
gttgattctacttgctgggcaggggggcgctctcccgtgcactgtaggatggtcagcggcttccttggccct

SEQ ID NO: 9344 - DNA, 72 bp, Homo sapiens
atcaacactgcctgctttgagttttcactgcttgtcggacaaaccttaggttgggggattgggggatatata

SEQ ID NO: 9345 - DNA, 72 bp, Homo sapiens
tgtggccgtccacctgggagccgatttatcactgccgtggcacagctcagaaaaaatcaggtgaaagtctgg

SEQ ID NO: 9346 - DNA, 72 bp, Homo sapiens
acagctctgaaagttttctgaccaacacacacgcgcgcgtgcgcgtacacatacacacgcataggtaactaa

SEQ ID NO: 9347 - DNA, 72 bp, Homo sapiens
gcaggtgtagaagtgcctaataaccatggctagtgcgcgctccccaatggcgagggtatgacagggacagct

SEQ ID NO: 9348 - DNA, 72 bp, Homo sapiens
ggcaaagtctaagcccttaaccaggcacaagagaccgtccctcaccggcctgtgcttccactattatttcct

SEQ ID NO: 9349 - DNA, 72 bp, Homo sapiens
acggaggggaggccgagaggcacagaccaagtccccgggtggctgcaggcagctccagcccggtcctgagga

SEQ ID NO: 9350 - DNA, 72 bp, Homo sapiens
cccttaatgtggggcagagtggcaggtcagagccccggccctggccccggccccagccccagctcctcctca

SEQ ID NO: 9351 - DNA, 72 bp, Homo sapiens
ggagcccagcaggaacttccctacggccattgtgacgggcaggtcctgagagtgggagctgtgccccaaatt

SEQ ID NO: 9352 - DNA, 72 bp, Homo sapiens
aagggtaaccacgtgctgggagatttgcagcacaacgcaaaggagaaggattagcgagcaccttgttccagc

SEQ ID NO: 9353 - DNA, 72 bp, Homo sapiens
cttctgtcactctgcctgggcatgccccagggcctcggctgggccctttgtttccacagggaaacctacatg

SEQ ID NO: 9354 - DNA, 72 bp, Homo sapiens
cgcacggctgcggcaaaagcttcgaggatgcctgtcgggccacccaactctccctgggctgtggcctgaggc

SEQ ID NO: 9355 - DNA, 72 bp, Homo sapiens
acaagctgttgccacatcagcactttgcgcctggacggtcccccagttgtcctggctgcaggcagtccgaac

SEQ ID NO: 9356 - DNA, 72 bp, Homo sapiens
ggttcaaaccccttctctgcagctttctagctctgcggccttatttaaatcgacctgcctccatttccacat

SEQ ID NO: 9357 - DNA, 72 bp, Homo sapiens
tcattgtcagccttttaaggaggccttgccaccagcgcaggggaggtgaagtctaagggaaggtaatattgt

SEQ ID NO: 9358 - DNA, 72 bp, Homo sapiens
acagtatattgcacaccttgccaaacattagttctcgttagattagaccacaaagaagtacacatttaagag

SEQ ID NO: 9359 - DNA, 72 bp, Homo sapiens
tgcggcccccacaagaatgctgtaaagcttcctcccgctgcttccagacaggcagcagcatcaggtccccca

SEQ ID NO: 9360 - DNA, 72 bp, Homo sapiens
gtaatgactgtggcattgaactccagcctgcgtaacggagtgaggtcctgtctctaaaaaaaaaaaagaaag

SEQ ID NO: 9361 - DNA, 72 bp, Homo sapiens
atttgctggcagcttctgtgtgcctcaggtgccagcggcctggctactcttgtttctcacagtgtgctgaag

SEQ ID NO: 9362 - DNA, 72 bp, Homo sapiens
tagaacttggccaatgctggtgactagacacatggcgggttgacgtgaggtgctgtggttattccaagaatg

SEQ ID NO: 9363 - DNA, 72 bp, Homo sapiens
tgcttgtgtagcctggcctaaggggcaagagaaggcgtggcctgtcctggcctctgagagtgggatggttgg

SEQ ID NO: 9364 - DNA, 72 bp, Homo sapiens
ctatagtgcacccctctgctttaaagaggcagccccgttcctgtggaaccaccttctggacccaggaagggc

SEQ ID NO: 9365 - DNA, 72 bp, Homo sapiens
agggcaagacctcaaaactcaagggtcctgagaatcgggccctcccacccctgacgcttgccccccccaaga

SEQ ID NO: 9366 - DNA, 72 bp, Homo sapiens
gggggtcccagtctccgggtatgcctccgcgctgccgggtaatggtgggatctacttttagtgaggcggagg

SEQ ID NO: 9367 - DNA, 72 bp, Homo sapiens
ttgcagtggctcaacccacgtgggcctggggactacgggccacctggatgatgctgggaggctatgaaagtg

SEQ ID NO: 9368 - DNA, 72 bp, Homo sapiens
cgccccggctggctcaggctccacaaggtcatccccggctccatctgaccttgagattaatcctgcagcctg

SEQ ID NO: 9369 - DNA, 72 bp, Homo sapiens
acattttagaggcacttctcttgcctgaaagaaaacgttcttcccctttttgtctctgatgaatctttactg

SEQ ID NO: 9370 - DNA, 72 bp, Homo sapiens
tctcactttattgtccaggctggagtgcagtggcgcgatgtcggttcactgcaacctctaccgcccaggttc

SEQ ID NO: 9371 - DNA, 72 bp, Homo sapiens
caaagactcagagagctcaataaaaaccttccacccgtcagtctagaaggataagagaaagaaagttaagca

SEQ ID NO: 9372 - DNA, 72 bp, Homo sapiens
caggagctgtttttgcagccagaatgcaggaggctcgggcgtctgctctttgattagcagggccctgtctcc

SEQ ID NO: 9373 - DNA, 72 bp, Homo sapiens
cccacgcgactcagccagggcaccaaggaaggaagcgagacaacttcctgcttgcagagcaggaggaagaca

SEQ ID NO: 9374 - DNA, 72 bp, Homo sapiens
tgggaaccacccactgcccctgcacaaagaatgggcggaaacaggagttcaccccgtgccatttctcactgg

SEQ ID NO: 9375 - DNA, 72 bp, Homo sapiens
ttataaagaggtttccattcctgatgaccgcctgccggcctgccagccttcagggcgagcggttccccacac

SEQ ID NO: 9376 - DNA, 72 bp, Homo sapiens
ctccaagtcgcaagacgccgtgagctccaagtccacgcagagtccgccaaaggctccggccgctgatccgct

SEQ ID NO: 9377 - DNA, 72 bp, Homo sapiens
aacagttttagtcagcaacgggtcatcagcaggaccgagaagactgggtgggaggtctggccggtccgaaat

SEQ ID NO: 9378 - DNA, 72 bp, Homo sapiens
gcagtctgagtgattgcagaattctcgcatgttcccggcagcctgtgcttggagttaccatgaaagcaagtc

SEQ ID NO: 9379 - DNA, 72 bp, Homo sapiens
tcgctgctgtggccagagccgagccggcgcaggggcggaggtgctgcaggagagttaaggaaaacgggccat

SEQ ID NO: 9380 - DNA, 72 bp, Homo sapiens
ggccccactcgctggaaggggcaatgaatcaccagcgtctccatgggaatcacaacccagctagcccagccc

SEQ ID NO: 9381 - DNA, 72 bp, Homo sapiens
ggcttgtgcctcatttccccagtgtctgatttcaccgacttggggtgtactctaggcactgagacttgtaat

SEQ ID NO: 9382 - DNA, 72 bp, Homo sapiens
agacagttgcagtctgactacccccttcaaatgtacgagaagactctcacccccatcccccgcagccaagga

SEQ ID NO: 9383 - DNA, 72 bp, Homo sapiens
accgtcagctccgccaggcgcctcctgcggcgccgcgctcctgccatgataccagcctgcagcttgcggccc

SEQ ID NO: 9384 - DNA, 72 bp, Homo sapiens
cttcatcttttgattctggagctctcctcactgaccgcatcacctggtgtttgggaagaatctagtcctgtc

SEQ ID NO: 9385 - DNA, 72 bp, Homo sapiens
ttttgggaggctgaggcactagaattgcttgaacgcgggaggcagaggttgcatcacaaaatccgccacaac

SEQ ID NO: 9386 - DNA, 72 bp, Homo sapiens
ctacctgtcaactaccaaggctgcagaacactgagcgataagggttatgagtatatgggatcctcttacctc

SEQ ID NO: 9387 - DNA, 72 bp, Homo sapiens
agttgtgtatcagcccacttcctgccccccttcttcgtctttaaaaacctgcttgtagcaaaggccagacag

SEQ ID NO: 9388 - DNA, 72 bp, Homo sapiens
cacgtgtagaaagcaaaacgttgacaagacacggccgttagcaaaaagccgaacggttactacgctcaacga

SEQ ID NO: 9389 - DNA, 72 bp, Homo sapiens
aggctgcacctccctcgcgtctgtgcctgcctcaacgcgggttaaactttgaccaaggaaatgattgctaaa

SEQ ID NO: 9390 - DNA, 72 bp, Homo sapiens
acctcttgtcagtttgtttcctaatgtacttcttccgttcctctagtctcttgacacttctcttttctttcc

SEQ ID NO: 9391 - DNA, 72 bp, Homo sapiens
tagagaccaggtgatggtgccctggaagacacttccgccagcaccctatggggcgcagtggcgtctaatgct

SEQ ID NO: 9392 - DNA, 72 bp, Homo sapiens
cctctccagctaggctacttgcgccagctgctgcccgttgggcagctcgccgaggacttgataaaccccatt

SEQ ID NO: 9393 - DNA, 72 bp, Homo sapiens
ctcactgctgccttctggcctttgcttttcggagccgagctgagtgagtcccaagggaatcaccctctgttt

SEQ ID NO: 9394 - DNA, 72 bp, Homo sapiens
ccagaaatgtgtcccagcgctgatggcatctggtacactttgtcaacttgatagggataaaatgataggttt

SEQ ID NO: 9395 - DNA, 72 bp, Homo sapiens
gccggccagtgctgcaaagaaatagccaggccacgcggctgacagtgtagcgtgcacagtgggcgccctgca

SEQ ID NO: 9396 - DNA, 72 bp, Homo sapiens
gtggggtgcagcccagccaacagcatgccagggcgcgtcactgcccacgcgatgctggcttcagccgccttc

SEQ ID NO: 9397 - DNA, 72 bp, Homo sapiens
gcactcctcctgggaggcagaggggacatccgaaacgggtgcagccccagctctggagcaagaagctctgcc

SEQ ID NO: 9398 - DNA, 72 bp, Homo sapiens
cccctcccggtggggtgaaggtgcccgggactcctcggggttgcatggctacagccggggcgctgccagggc

SEQ ID NO: 9399 - DNA, 72 bp, Homo sapiens
aaagctttgtcatcaaagatggaaacatcgtttcccggccggttctaatctttccaaatcacagtgagtggt

SEQ ID NO: 9400 - DNA, 72 bp, Homo sapiens
cagaggctggctcctctgaggtatgcatgcgtcggcgtggagttactatttaaagttctgaccagaaaggaa

SEQ ID NO: 9401 - DNA, 72 bp, Homo sapiens
ctgagaggcaaatcccaaatctgacctgctcagcccggctgccgcatggctctggtctcatgctctgagctc

SEQ ID NO: 9402 - DNA, 72 bp, Homo sapiens
ctctgccggcgcccaggggccctaacgcaattcatcgagacccgcaggtcagaactgcagtctcacctgtct

SEQ ID NO: 9403 - DNA, 72 bp, Homo sapiens
caccgctttgatcacaggtactgcccgcctctcctcgcccccaacccgctgccttggtggtggtggggggat

SEQ ID NO: 9404 - DNA, 72 bp, Homo sapiens
caagaaggcagttccactgggaagtcagtcaggtccggcggcagcgcttcctctggcagggccgaggctcgc

SEQ ID NO: 9405 - DNA, 72 bp, Homo sapiens
ggagacagggaggacggtgcctgcccctttaagatcgactccaccccgcctctggaggaaaatgacgccgcc

SEQ ID NO: 9406 - DNA, 72 bp, Homo sapiens
tcaccgtgttagccaggatggtctcaatctcctgacgtcgtggtccgcctgcctcgccctcccaaagtgctg

SEQ ID NO: 9407 - DNA, 72 bp, Homo sapiens
agggggaagatgggaagaaacagacgggagacgcccgcccagaaagactgcgggaagaaagaaattcgagag

SEQ ID NO: 9408 - DNA, 72 bp, Homo sapiens
ctgtacacgctcacccatgtggtgctgctcatctacgaggcggaagtgagtccgactggcccctggccgggc

SEQ ID NO: 9409 - DNA, 72 bp, Homo sapiens
ctagctcttcttctcccaggtggtgacaatgcagacggtaagaacatcgctgtcagctgcaaggttacatgt

SEQ ID NO: 9410 - DNA, 72 bp, Homo sapiens
gcctataatctctgctactcaggaggcttgagccccggagtttgaggctgcagtgagctatgactgtgacac

SEQ ID NO: 9411 - DNA, 72 bp, Homo sapiens
gtgtgaagtagttaatgcccaagggcattaaccttcgatcaaagaggacaggagccgacatacaaatgcttc

SEQ ID NO: 9412 - DNA, 72 bp, Homo sapiens
acctggaaaatggggtcactcccacccgaatgctgcgcttttccgatgggcttacgaaacgacgcaccagta

SEQ ID NO: 9413 - DNA, 72 bp, Homo sapiens
ataatcatgttgataataatcattgtcccctagtccggaaacagggagaggaggagacagctctggggctgc

SEQ ID NO: 9414 - DNA, 72 bp, Homo sapiens
gccactcatccctgcttgtaaatgtgtcctccacacggttgtcagcaccatatttctaaaatgcaaatctgg

SEQ ID NO: 9415 - DNA, 72 bp, Homo sapiens
gagggcgctggcgttggccgagagtccctgggcagcggcggcgggaacgcggaaggttccctccacccccac

SEQ ID NO: 9416 - DNA, 72 bp, Homo sapiens
cgagaagctctggcgcaacgcgttgctcgctggggcggtgccggtggtgctgggcccagaccgtgccaacta

SEQ ID NO: 9417 - DNA, 72 bp, Homo sapiens
ttccatcctaatgtgagaaccatccatttttgcagcgtcgggtcattggagaccaccgtattatgagtattt

SEQ ID NO: 9418 - DNA, 72 bp, Homo sapiens
aaaccatactttaagtgttttcatagatcatgctgcggtccttgcattcatgtttgtatagtggctgccttg

SEQ ID NO: 9419 - DNA, 72 bp, Homo sapiens
aacatcaaacttagaaactcatctttcagcagcagcggtagagcagtgaccaggcgtctccgcgatgggccc

SEQ ID NO: 9420 - DNA, 72 bp, Homo sapiens
ctcaataaaaagaatgactcctatgttttgggctacaggaaggttggagctactgccatccaacaatgtctg

SEQ ID NO: 9421 - DNA, 72 bp, Homo sapiens
tttgggagagaggtagaaattggaacactgacctacgcttttcattgttaactctttggatttatctggact

SEQ ID NO: 9422 - DNA, 72 bp, Homo sapiens
aggaggaatcggacaggctgatcacttggagtgttcgcctaagcagtttctagaaatggaggcagggaccat

SEQ ID NO: 9423 - DNA, 72 bp, Homo sapiens
cctcctggctgagagctggaggctggccatactcacggctccattctgtatggccttccacctcctgcagag

SEQ ID NO: 9424 - DNA, 72 bp, Homo sapiens
ctcccaaagagtgttagaattcccactcccagcttcggggccactcacacaaggtgattgaagtggaaacca

SEQ ID NO: 9425 - DNA, 72 bp, Homo sapiens
gagaagaaacgtggggaaataaaacccctggttgacgtgcagaagagacaaacagtgagaatctctgtgagt

SEQ ID NO: 9426 - DNA, 72 bp, Homo sapiens
atcatcacgagaacagcatggggcaaaccgcaccacgattgagtcacctcccaccaggtccctccctaacat

SEQ ID NO: 9427 - DNA, 72 bp, Homo sapiens
gtttatgctactttcaaggtaataagttagcccaccgccatttcctagatgctgccagaagatatgagactc

SEQ ID NO: 9428 - DNA, 72 bp, Homo sapiens
cgaccaggctgacgagagcctgaagacgggctgcacgctcgtccccaaccctgcaggcacctgtgcgagtga

SEQ ID NO: 9429 - DNA, 72 bp, Homo sapiens
gtctgcctgcctgctctgtgacacctgctctgtgacgaccgctctgtggtgcccgctctgtgccgtgtgagg

SEQ ID NO: 9430 - DNA, 72 bp, Homo sapiens
ttcactgggggaactgtgactgtcccttcctcgggcggggatgcgcctgcgaggtcccagcggccttccctg

SEQ ID NO: 9431 - DNA, 72 bp, Homo sapiens
gccacgttcactgttaactggctactgatgggagacgaggcaaactgcttaacctttctatgcctccatttc

SEQ ID NO: 9432 - DNA, 72 bp, Homo sapiens
cgaaatcgtgggggtatctgagagcttctggggcgcgcgggtgcaggggaaggggtcatgcttccgtggaag

SEQ ID NO: 9433 - DNA, 72 bp, Homo sapiens
tcacttcctactttgtagagtccaactctttagcacggtgtgcaggcccttcatgatctgcgccccaactcc

SEQ ID NO: 9434 - DNA, 72 bp, Homo sapiens
ctggagtgtttagaatacaatagagcccaagtaagcgttgaggttaagtgccttcaaagggaagtaagaaga

SEQ ID NO: 9435 - DNA, 72 bp, Homo sapiens
gatggtagccccaggacccaggatggctaacatttcgcaggcgccatgtgccaggcggtgttctaagtgctt

SEQ ID NO: 9436 - DNA, 72 bp, Homo sapiens
tcatcctgatagaatctctagtacaagtaagtagacgtggcaagaactgatatatttgtcttatttgagagc

SEQ ID NO: 9437 - DNA, 72 bp, Homo sapiens
cacatccgaaagggcctagcgggaggctagagaagcggcacttggggagcgaagaccttccctccccttgcc

SEQ ID NO: 9438 - DNA, 72 bp, Homo sapiens
tcctaaggatgtggtggacaggggctgggcacccacgaggctgcagcagctgtcagccattatccctaaaat

SEQ ID NO: 9439 - DNA, 72 bp, Homo sapiens
cgggagaccctgtcggacaaggaggaaaagcagtgcgcactgggccctcagatcagccccctgaagcagagc

SEQ ID NO: 9440 - DNA, 72 bp, Homo sapiens
cagagcccacagagaaggaaaactaaatatcatcccggatgcagtccactacgatcgtggaggagtcagatt

SEQ ID NO: 9441 - DNA, 72 bp, Homo sapiens
aggccacaagggtgacactggcagaggcctggaaccggctgtaccagcttggctgggcccccgccctccctg

SEQ ID NO: 9442 - DNA, 72 bp, Homo sapiens
gagaaaacagtactaacaccatccactgattgactcgcatatttccatcacttaaagctcctggcgtcactg

SEQ ID NO: 9443 - DNA, 72 bp, Homo sapiens
ttttccatcttccttcctgctcaccccaccatcaccgtggccccatctagttgaggcacacagctctgggct

SEQ ID NO: 9444 - DNA, 72 bp, Homo sapiens
tctgcctatccacgcgtgttggacgtgtgcctgtacgttaagtgcaggaagtgccagcctcagtgtgaacga

SEQ ID NO: 9445 - DNA, 72 bp, Homo sapiens
cttcttgggttgagggctgtctgttacacagaaggcgatgggaaaatgtgtcatggaaaagtagtagtctct

SEQ ID NO: 9446 - DNA, 72 bp, Homo sapiens
aaagcgctgggattacaggcgtgagccaccgcacccggcctagtattttcattttacagagaaagatatgaa

SEQ ID NO: 9447 - DNA, 72 bp, Homo sapiens
ccggggtctgggcttgggaattggctggcacccagcggaaagggacgtgagctgagcggcgggggagaagag

SEQ ID NO: 9448 - DNA, 72 bp, Homo sapiens
tggggaacagcaggagctcgttttgttagcaggtgcgaggcgccgggcatttaaaggcggcctgacgggacc

SEQ ID NO: 9449 - DNA, 72 bp, Homo sapiens
gttaacccaaacatttggtttcaggatcccataagcgacccatgacaggaagacttgggcttccctggctag

SEQ ID NO: 9450 - DNA, 72 bp, Homo sapiens
accccgggctcgcctctctcggctctggctggccacgaccttccttttgaaggtgcctggagggtgactccg

SEQ ID NO: 9451 - DNA, 72 bp, Homo sapiens
atctccatggcatccatcccttggacctgtaccaccgaatactctggaggacacagaggcatggcaatggtg

SEQ ID NO: 9452 - DNA, 72 bp, Homo sapiens
actgagacgaagctccccctccaccgggagcggtccggcgtcactcgcctgcacggctgcctgctgaacctg

SEQ ID NO: 9453 - DNA, 72 bp, Homo sapiens
tagtgccctggagttgtgaaaaagaaatgggctcccgcagctgcgtcacagcatttgatcacttcagccgag

SEQ ID NO: 9454 - DNA, 72 bp, Homo sapiens
cttgctgtggaaatctgtgcctgcccccctgcctacgctggtgactcttgtcaggtaggaagttttcccatc

SEQ ID NO: 9455 - DNA, 72 bp, Homo sapiens
tgccataagctagacagagcttttgagatgcaaaccgtatacactctcagaggagaggattgaaaccaaaga

SEQ ID NO: 9456 - DNA, 72 bp, Homo sapiens
cctggggctagagcaatcacctaactatacacccccgccccccagcccccgcctcattaacaacttccctaa

SEQ ID NO: 9457 - DNA, 72 bp, Homo sapiens
tcattccctaaagaaaacttgagtttccaggcttccgcgtccccagaagttggcgcgggttctggggtcgct

SEQ ID NO: 9458 - DNA, 72 bp, Homo sapiens
ttcacggagggagtttcttgggctttgcagagtctcggagagggtgccgggggatggggagtgagagacccc

SEQ ID NO: 9459 - DNA, 72 bp, Homo sapiens
gggccaacccacaaggagctaggggtagctgaaatcgctcgccagcctgcagcatctctgaggccgtctggg

SEQ ID NO: 9460 - DNA, 72 bp, Homo sapiens
catggctcatggtgaggcctgtcttccaccctcgtcgaatatcattacatcactcttttccagttacaggaa

SEQ ID NO: 9461 - DNA, 72 bp, Homo sapiens
tcctagcaatggctttttaaactctgctgcgaggacgcccagcatcagcgacatccaactccctggaacggc

SEQ ID NO: 9462 - DNA, 72 bp, Homo sapiens
ctgcttcctcttcgcatcaggggcgtggctgcttacgctggttccctcgatagcagagcctgagatagggac

SEQ ID NO: 9463 - DNA, 72 bp, Homo sapiens
atttgttgagcagttacttggtggcagagacgatgcgaggagttaaaggcatgcagcttagcaaagccacgc

SEQ ID NO: 9464 - DNA, 72 bp, Homo sapiens
ggtgtgtaatgtaacgcttgcctttcctctctgcacgtccaggctgccccccggtgtggaccccacccaagt

SEQ ID NO: 9465 - DNA, 72 bp, Homo sapiens
ggaaaaagatgtctattcttccctgtgtgcatggacgagcctggaaacagatcttgggtgggctgagaagca

SEQ ID NO: 9466 - DNA, 72 bp, Homo sapiens
aatcactaaggtgtaaaaaatgtgtttgcatggctcgggtactaaagttctataagaggaggtaggaatgga

SEQ ID NO: 9467 - DNA, 72 bp, Homo sapiens
cggcaggagattcgtggcaggcggaacgtcgtcgtcgtcgttggccgtgagtgtttgcttcacacagggacc

SEQ ID NO: 9468 - DNA, 72 bp, Homo sapiens
cctcccagtggttcctgcaaagccccagggggactcggagtggcctcctcttgacagtcagttgtgagtcag

SEQ ID NO: 9469 - DNA, 72 bp, Homo sapiens
gctccagagacagggaggatggcgaagagaagggccggtggcatgcctgccttagccaactctgcacaggaa

SEQ ID NO: 9470 - DNA, 72 bp, Homo sapiens
ctgccggctgcccgccttcctccaggacgccgggccggccccctctgactcagcagcatgggcggcccctcc

SEQ ID NO: 9471 - DNA, 72 bp, Homo sapiens
ctgtgtcccacaccctcctcacccagggacaggaacgtgcttttacattgcagcctctgatggatgagaaac

SEQ ID NO: 9472 - DNA, 72 bp, Homo sapiens
ggatctcttgaggccaggagttcaagaggagcttacgcaacatggcaaaaccctgtctcaagaacaaagaaa

SEQ ID NO: 9473 - DNA, 72 bp, Homo sapiens
ggtaactggttcgggaggttcattgtggaaggctgcgctcggccacccactcccttagctatgctgtccctt

SEQ ID NO: 9474 - DNA, 72 bp, Homo sapiens
acagctgcaagccaggagacgagatagtaagtggccggggcaggctgggagggagccaagttgcagagggaa

SEQ ID NO: 9475 - DNA, 72 bp, Homo sapiens
cgtctagagccactgggagaggtgagatgccctcccgggtcctgcagtgaccccaggaccatgactggcaca

SEQ ID NO: 9476 - DNA, 72 bp, Homo sapiens
gatgtgaacatacaagaaatattcaaaagaacacacgagcagttgctggcattccagatagagccacagcct

SEQ ID NO: 9477 - DNA, 72 bp, Homo sapiens
aatgcctctcctgccgaggtcggaggcaggtcttccgcacggagatgatttattcaggagccttttaaaact

SEQ ID NO: 9478 - DNA, 72 bp, Homo sapiens
aatttggactctggaaacagcctgggttctaacgccggttcctccacttcctcgctgtggcccttggcaagt

SEQ ID NO: 9479 - DNA, 72 bp, Homo sapiens
gggtttatcaagggttcctgcttttgctgcttcctcgttttcttttgctgctgccacgtaagaagtgtcttt

SEQ ID NO: 9480 - DNA, 72 bp, Homo sapiens
tcgcccagcagcaagggctgcaaaatagtagaactcgtggttgctttggacaggtgtgatttgtgcaagcca

SEQ ID NO: 9481 - DNA, 72 bp, Homo sapiens
acaggatggaactcttcaggattctagtttccctccgcgtgggtgcggaggtatcaaggggtcggctcagtg

SEQ ID NO: 9482 - DNA, 72 bp, Homo sapiens
gcttgtagcaggaagccaacaaggggtgccgatgacggccacgaccccgtatctctgggctgtctctctcac

SEQ ID NO: 9483 - DNA, 72 bp, Homo sapiens
ctgttttccctgtgggccgctggaaggaggcagtgcgtggaggaagctcctagccccggagttcgcggtcca

SEQ ID NO: 9484 - DNA, 72 bp, Homo sapiens
ccttcctattaaatgctaccaaactccagaaagagcgtgccttggctttgtgaggagctcagaggctctgag

SEQ ID NO: 9485 - DNA, 72 bp, Homo sapiens
tgagaaaggggcggagagaaacaaaacagatcgcacgccctcacctaaaacaccgctaggcaggacctggtg

SEQ ID NO: 9486 - DNA, 72 bp, Homo sapiens
ggaaataggcagatagccaacacttctttatcaaacgggctggagctgagactgtcagacggagacatggac

SEQ ID NO: 9487 - DNA, 72 bp, Homo sapiens
gtgccgttgagtcctctcaactgggaacgagtcaccgtgtatctggagaccatgtgtgtaacgggttgcacc

SEQ ID NO: 9488 - DNA, 72 bp, Homo sapiens
tgaggtccagtgggggctgcatgatcgggggctgccgtagcagaggcaggggccctgcccggctcaggctgc

SEQ ID NO: 9489 - DNA, 72 bp, Homo sapiens
gtcttctcagaggctgacatgcgcttctatgcggccgagatcatcctgggcctggagcacatgcacaaccgc

SEQ ID NO: 9490 - DNA, 72 bp, Homo sapiens
tcaaccctcggcctgcagccagagtagccaggccgcgcaccccaaatgtagtcccccgattttagctgcagc

SEQ ID NO: 9491 - DNA, 72 bp, Homo sapiens
cactgctcgggcgtcaggctcaggtagctgctggccgcgtacttgttgttgctctgtttggagggcgtggtc

SEQ ID NO: 9492 - DNA, 72 bp, Homo sapiens
cttttcagacgctcccttggccgcgcacccgggatcggaacagcgctgtcacttgcgacaaaatccctaggc

SEQ ID NO: 9493 - DNA, 72 bp, Homo sapiens
ccagataaggattagcccatccctcttcattccctcgagccttctgcatctggccctcccagtgcacctgtt

SEQ ID NO: 9494 - DNA, 72 bp, Homo sapiens
tggaatgtaagcacggatgaaaaaggggatgcaaacgagagaggcaagagttgtttcctttacagcttagga

SEQ ID NO: 9495 - DNA, 72 bp, Homo sapiens
agcaactgaagtcagaggggtttttatttcctggtcgccagatagcatggcgactgtgtcagcagctgttct

SEQ ID NO: 9496 - DNA, 72 bp, Homo sapiens
gaggaagtgggaacagagaagaggaggaacaagtacgtgtacattgcagcacacacctgtcaccaggtgacc

SEQ ID NO: 9497 - DNA, 72 bp, Homo sapiens
tcttggggtggaggtgggtgggtaaaataacccgccggttgagagccactgtgttagaaagattgtacacat

SEQ ID NO: 9498 - DNA, 72 bp, Homo sapiens
tttaggtccgaattcccggcatataagaatactaccgtcgcttgtttttcagatttttgcggctattttcgt

SEQ ID NO: 9499 - DNA, 72 bp, Homo sapiens
tgacatgctgcagggtcacagatttctctaggtgtcggattaacaggaagttaaatcaaacaaggagtgtga

SEQ ID NO: 9500 - DNA, 72 bp, Homo sapiens
cctcacgcgcgccccgcacgcgcgcccgcctcacgcgcgccccgcacgcacatgacggcttggcttacctgt

SEQ ID NO: 9501 - DNA, 72 bp, Homo sapiens
tgacctttcagggtctagcgttgtaaagcatctcacggttgctgccaaaccagccatgaactgggcggggtt

SEQ ID NO: 9502 - DNA, 72 bp, Homo sapiens
aggaggcaggggctgggctgagcgggagtgggcagcgctgtgtcctggcctggggagcatggctgagcacct

SEQ ID NO: 9503 - DNA, 72 bp, Homo sapiens
caaagaggatccatcatcccaggaggaggcccacacgccagaggcacccccaccccagcctccttcctcaga

SEQ ID NO: 9504 - DNA, 72 bp, Homo sapiens
caaatccaaagagctcccagaaacctcaatcacagcgccaaaaccattccataccagggatggaggtgcaag

SEQ ID NO: 9505 - DNA, 72 bp, Homo sapiens
cagagacggacggcggcctgagagggcagcagattcgcgctaacagagcaggtcaagcagggcctcctcgcc

SEQ ID NO: 9506 - DNA, 72 bp, Homo sapiens
cagtttaggccaaaatccccgcgggttggtcggggcgggagcggggctcggtgttcggggctgacggcgggg

SEQ ID NO: 9507 - DNA, 72 bp, Homo sapiens
ggtaacagcaggcgggcaactgtaggtaacctaagcggaaaacaaaccaggacgcatgcgcctctagagaac

SEQ ID NO: 9508 - DNA, 72 bp, Homo sapiens
attaaacagtcttcagttagcacatgggaatataccgtctctttgctgctgggactgtgactgctgctacat

SEQ ID NO: 9509 - DNA, 72 bp, Homo sapiens
tgggctgatgcctgtgaatggtctgggcttcccaccgcagaacgtggcccgggtggtggtgtgggagtggct

SEQ ID NO: 9510 - DNA, 72 bp, Homo sapiens
ggggaccgggcatttaccagtcttcctgaggtgtacggtggctgcttcaagacaaaggaaatgccaagtgga

SEQ ID NO: 9511 - DNA, 72 bp, Homo sapiens
cccaccataaatctaaagctgcacttgtactaatacgagcagtttactgaatgagccatactgtttcctgac

SEQ ID NO: 9512 - DNA, 72 bp, Homo sapiens
tcttctctcgggccagcaggaagcctgattaatgccgcttaatacgacacttcccatatttatttggccaca

SEQ ID NO: 9513 - DNA, 72 bp, Homo sapiens
tcttcctctttaatgtggctgtttcctttcctccccgcttccctgggctcctgtggccagctcttacagtga

SEQ ID NO: 9514 - DNA, 72 bp, Homo sapiens
ctcctaagaaaagcacaagagggccacaatttgatcgtcttggcctggattcagctgcaggagtgttcttat

SEQ ID NO: 9515 - DNA, 72 bp, Homo sapiens
tttttaacccttttcccattttcacccagaatactcgctggtggcacttgcagctgcagggtttaccctgag

SEQ ID NO: 9516 - DNA, 72 bp, Homo sapiens
aggtcaggtcctgctgagccccctttccaagtgtgcggtgcgcaagccgcccaacccaggggccggcagctg

SEQ ID NO: 9517 - DNA, 72 bp, Homo sapiens
gggcagctcccttctcccttggcctcaggcctaggcgggcgaggctgctcccaccagcagggggcgctttga

SEQ ID NO: 9518 - DNA, 72 bp, Homo sapiens
ttgcatgctcttgcatgcacgttctcgctctctctcggtctctctctctctcagatttttatattatactcc

SEQ ID NO: 9519 - DNA, 72 bp, Homo sapiens
gctcccaaccacaatatcctttggggtttggcctacggagctggggcggatgacccccaaatagccctggca

SEQ ID NO: 9520 - DNA, 72 bp, Homo sapiens
cgccccccggagcaggagcggtggatccactggtgcgcttccactgcgaacttcctcttgaagcgcatgcca

SEQ ID NO: 9521 - DNA, 72 bp, Homo sapiens
tcctgtcaagctggtgactgagacttcccatcactcgctgtcatctctgagagcacagatttgttccttctt

SEQ ID NO: 9522 - DNA, 72 bp, Homo sapiens
ttacaagttggttcgacatagccaaatccgcgtgccgcatttccacgctatggagtgctagtcttcatgatt

SEQ ID NO: 9523 - DNA, 72 bp, Homo sapiens
ggcgccagcccactggggaggtggcgctgggcgcgcgggatgcgcggggagccttctctgcaggagccgcac

SEQ ID NO: 9524 - DNA, 72 bp, Homo sapiens
cccggtggtcacctgatcgtactgggggtatcagccggacaccccgcctccagaacccgctgcctctgtcca

SEQ ID NO: 9525 - DNA, 72 bp, Homo sapiens
ccctgtggggtgggtgtcatcaagcccgtgttacacgcctgtattggatgacaaattctaccaagcacacag

SEQ ID NO: 9526 - DNA, 72 bp, Homo sapiens
taggttaagggccagatttagacactgatggcctgcgtaaggaggagcaaaccacacactgcttgctttggg

SEQ ID NO: 9527 - DNA, 72 bp, Homo sapiens
gcctctggtcttctgaggaagcagtctgaggagcccgagttttgaaaagggaagcaatcctccaaggctgcg

SEQ ID NO: 9528 - DNA, 72 bp, Homo sapiens
tggcgggggaagtgttcggctagggggtgaaggcccgggcaagctcacccttcagtgttgatttaaagggat

SEQ ID NO: 9529 - DNA, 72 bp, Homo sapiens
gcacaaaataagaaaacaggccacagggtcgcagccggtctcacccaccgtgaggttatctgatttattccc

SEQ ID NO: 9530 - DNA, 72 bp, Homo sapiens
ccccagtttcctccgtagatcacacagggaggcagcgaggcagggtgcaaggatgttaggggtggaaggggt

SEQ ID NO: 9531 - DNA, 72 bp, Homo sapiens
cagacacggcctgggggacccactactgggtgttgcgcgggcgccctgcagggtgcggggctcagggcgtgc

SEQ ID NO: 9532 - DNA, 72 bp, Homo sapiens
tggtgaaatgctgcagatcccttcatacagaaggacgctgggatgattcgtaagggaagagaatcccatgct

SEQ ID NO: 9533 - DNA, 72 bp, Homo sapiens
ctggaccctcccatccctgcaggctgctggtggaccggttctcaggccggttctgggcctggctggaacggg

SEQ ID NO: 9534 - DNA, 72 bp, Homo sapiens
aattcacaaagcatcagttatgggtgcagggaagtcgccatctgccaatgggcaccagagtgtcactgtact

SEQ ID NO: 9535 - DNA, 72 bp, Homo sapiens
acgacacctccacccccggctcgtaagctaatttgcgtcacatatggcgtaagagccctgtcggagcggggg

SEQ ID NO: 9536 - DNA, 72 bp, Homo sapiens
agggcaggccaccaagatggggaacttcacattcacgggagggaaactggggccctccgggaggctaatcag

SEQ ID NO: 9537 - DNA, 72 bp, Homo sapiens
gaagtcaccccttgcaaaggctagggcagatggggcggaacagggcacctctctggccggtgcccgggagtg

SEQ ID NO: 9538 - DNA, 72 bp, Homo sapiens
gctgtgccacagacggaggcgtcagggttatggggcgctgcggccgggactctgccacagacggagggtcga

SEQ ID NO: 9539 - DNA, 72 bp, Homo sapiens
catataagtccttagctgtacggcccttaggcaaccggagatgagattctatttatatacagccaagttctg

SEQ ID NO: 9540 - DNA, 72 bp, Homo sapiens
caaggtgtgttgaggagggggtgaaaggaggttgtcgaaggataggaagcagcacaggactggaaagaggga

SEQ ID NO: 9541 - DNA, 72 bp, Homo sapiens
aggctcggtctgcaagagttgtcatttgttggctgcggtgagaccacgccccgtcgccctcccacacctgac

SEQ ID NO: 9542 - DNA, 72 bp, Homo sapiens
gtaggtgctgcgcaggtgcacgcgatcgtggtgctcggctacctggagggcctcctgccaccggcccgcagc

SEQ ID NO: 9543 - DNA, 72 bp, Homo sapiens
gccccggcttgaggctgttgctagagttatcttcccggaatgtgcttgcaaaacctgaggtactgtgtgatg

SEQ ID NO: 9544 - DNA, 72 bp, Homo sapiens
cttctcgatacattcagtaataatgctgacaaggccgacaaagtgttgactgggagaggaagttatgggact

SEQ ID NO: 9545 - DNA, 72 bp, Homo sapiens
ggacaaggggaaggacgagagaactcttgcaccgacggatgtagttccaagcgacccgaaatgaggaaaacc

SEQ ID NO: 9546 - DNA, 72 bp, Homo sapiens
aaaactgctccagacttgggaccaggaccagctgccggaaaagagccgcctgggaaggggtggaccgcccgg

SEQ ID NO: 9547 - DNA, 72 bp, Homo sapiens
ttcgtctgatccgtttgtttgggaaaaagagcaggcgggcagggcaggccagagaccgactcctttctggag

SEQ ID NO: 9548 - DNA, 72 bp, Homo sapiens
acttccaaagacgccttgaaaaggttttctgctaacgaaactcttcttagtcaaatgaggaaccaaaagcag

SEQ ID NO: 9549 - DNA, 72 bp, Homo sapiens
tggctcaaggtagtcacagtttcaacattccattccgctacattccctttgatgacagcatttgtttgtgaa

SEQ ID NO: 9550 - DNA, 72 bp, Homo sapiens
cctttgacagataccaatactaaaatcattgttcacgtgtcaatttaaaagaccattaaagcagcttatttt

SEQ ID NO: 9551 - DNA, 72 bp, Homo sapiens
aggtctgttagggtccctgtgtggccggcaggactcgtggtgaagcccggggaaggcctgggtcctccaggt

SEQ ID NO: 9552 - DNA, 72 bp, Homo sapiens
tgcggagctttctgatgcctggcagggttttgtcccggtcagtggttgagtgagccacacctccctcccctg

SEQ ID NO: 9553 - DNA, 72 bp, Homo sapiens
cctagtactggaaaggccccagcaagagtgtttgacgttaggggaagtttggggaaaaatctctaagcatat

SEQ ID NO: 9554 - DNA, 72 bp, Homo sapiens
gagggctcttggctcatggctctggaccggcgagccgtgcgggtggagatgggcgccggctcctccgcggcg

SEQ ID NO: 9555 - DNA, 72 bp, Homo sapiens
cagtttagacgaatgggctataggcagaacacacacggccagggttctttctggtgccctaccacctgtttc

SEQ ID NO: 9556 - DNA, 72 bp, Homo sapiens
aaataccaagcctggaactctggagaaggcgccgccgctcgtgtagttctgaaaggctctctttgtcctgag

SEQ ID NO: 9557 - DNA, 72 bp, Homo sapiens
ccagtgtgggtcccgttctgctggatgggagctgccgccatcatgtttgcagttcctgccgctgctaccggg

SEQ ID NO: 9558 - DNA, 72 bp, Homo sapiens
acggcctcctgggctcggcgcgcggggccgggctgcggttggccacaagaggcatccatcttcccggaccag

SEQ ID NO: 9559 - DNA, 72 bp, Homo sapiens
gtacctccacacgcagtcatagagccgggagccatcggacccacctgccaggacgcatgacaggcagaagat

SEQ ID NO: 9560 - DNA, 72 bp, Homo sapiens
ttggccgtaagtgcttcatggagttggctgtccttcggcgaaatattttggaaatagcagaatggtgcttgc

SEQ ID NO: 9561 - DNA, 72 bp, Homo sapiens
gcaaacttctgatcgttggtagtgtgggtgagtgccgcccacctagcctctcggggtgtgggagcctgattt

SEQ ID NO: 9562 - DNA, 72 bp, Homo sapiens
tcatggacactccccggtttccgccaggtgctgctcgggcagccaagttcccaccctgggtcccaggaggcc

SEQ ID NO: 9563 - DNA, 72 bp, Homo sapiens
atttggggaacagttcagaggtgaaaagcactgatcgaagagggagaagctaaaatcaggagacctggtttc

SEQ ID NO: 9564 - DNA, 72 bp, Homo sapiens
tagcagaagtttacttttgagccaagagtctgatccggtctccctcttttttttttttttctttctttaaag

SEQ ID NO: 9565 - DNA, 72 bp, Homo sapiens
tatgaggaccagcacctggggaaccccttcctccacgcggctgccccctgcccgggtgaagtggttctccac

SEQ ID NO: 9566 - DNA, 72 bp, Homo sapiens
tatgtctggccccacgctatctacatacagagttacagcagtgaaccaggtgggctagctgcttaccttggg

SEQ ID NO: 9567 - DNA, 72 bp, Homo sapiens
tctagcagtgtatttgctacacacttttgtaaccacgataattatatacaaagggtagtttttgccccagtg

SEQ ID NO: 9568 - DNA, 72 bp, Homo sapiens
ccaggttgggcggggcctggacatagcacagatcacgtttctccgcaagtgataccagatagaaatgaatgt

SEQ ID NO: 9569 - DNA, 72 bp, Homo sapiens
agcctgacaatgaccacaggcagggaggatgctgacgtgcacaacagccaactcactcaccacctgcagagc

SEQ ID NO: 9570 - DNA, 72 bp, Homo sapiens
tcaagtagactctgaagaagtgcagagtttgataccgtttatgcaacatttaaaagcatgcaacacagtcta

SEQ ID NO: 9571 - DNA, 72 bp, Homo sapiens
tgcaggtgggcagggaaaccgccctcttcaggacgcgcttgtatttctgcatcctgtgtcctgagcctggcg

SEQ ID NO: 9572 - DNA, 72 bp, Homo sapiens
ttggtaactggccctctttctctttcctgtgatcacgtccccactgacgctcctgtttgtaggactaggacc

SEQ ID NO: 9573 - DNA, 72 bp, Homo sapiens
gagagcagggatttgtggaatgactcactgtgtagcggcgtcttctggcggtggacgaggccgggcgcacga

SEQ ID NO: 9574 - DNA, 72 bp, Homo sapiens
tttctccgagtgtgaggtgtgcttggggaggccggcggccgagtggccaggcccaaggccttaaagagaagt

SEQ ID NO: 9575 - DNA, 72 bp, Homo sapiens
cagggaacaaaggcggaaggaagcaaggaaaggagcgtaaccttccctttggcagatgtctgggaaaagggg

SEQ ID NO: 9576 - DNA, 72 bp, Homo sapiens
gcccttcccagcaactccccaatgcctcactctaacgtttgtagaggaggggcctgaggctcggaggagtgg

SEQ ID NO: 9577 - DNA, 72 bp, Homo sapiens
tgtcagaatgggcccctggcacggctgcccggcggcgccaaggcctggggatgactggcagtgggggaagtg

SEQ ID NO: 9578 - DNA, 72 bp, Homo sapiens
tcctggcagcgctgctggtggcggagcgggggtggcggccggagcccttggctccatagggcctctgcccac

SEQ ID NO: 9579 - DNA, 72 bp, Homo sapiens
gcatcggcgactccagctgagtgcaggacagggagcgaggggttctgaggaactcagcagacctatcctgga

SEQ ID NO: 9580 - DNA, 72 bp, Homo sapiens
agacttggtagcaggaactgcacgtacggaggttccgaggtcagaacaagcttgcaacgtccaggaaacgac

SEQ ID NO: 9581 - DNA, 72 bp, Homo sapiens
gtttgcccatcgtcatcagggggcactaaggaccccgaggagcacggggatgtctgccgggtccttctcatg

SEQ ID NO: 9582 - DNA, 72 bp, Homo sapiens
caggcccagcaagtcctctgccaggctggtgagctcgttctcctcgagtgcctccaccaggcgctgcagcgt

SEQ ID NO: 9583 - DNA, 72 bp, Homo sapiens
gattcagctgcctcacgaagactgagctggacgggcgtggagaaggtgcttgtctgtcaaggacgtccccgt

SEQ ID NO: 9584 - DNA, 72 bp, Homo sapiens
cggagatatggagcggggtcagcgaggcctggtggcgcctcctggagtctgggacgagcggcggtccgagga

SEQ ID NO: 9585 - DNA, 72 bp, Homo sapiens
cctcggcctcctgagtagctgggattacagggatgcgccatcacagaccccgggctaattttttttagtaga

SEQ ID NO: 9586 - DNA, 72 bp, Homo sapiens
ccttctttctaggagtctggagctctccagagccccgtccccagccctgggcagctgggagtgaagggcacc

SEQ ID NO: 9587 - DNA, 72 bp, Homo sapiens
tggggaagacagtcaccccatacccgccaagttaccgcaaggcaagagccctggaggaaatagctgagagcc

SEQ ID NO: 9588 - DNA, 72 bp, Homo sapiens
ctttaactgtctaataagcatagttccatgactgtcgccccaggcccttcaacataaacctgtctaaaacca

SEQ ID NO: 9589 - DNA, 72 bp, Homo sapiens
caatagcgatactttttcttgtctaatttggtttccgggaaagcttcgttcaagtcgtcaatggtcatctga

SEQ ID NO: 9590 - DNA, 72 bp, Homo sapiens
tatgcagttcactgaaactttccacaaaactaatacgtccatttgctaatcatgaaaaataatcttcatatt

SEQ ID NO: 9591 - DNA, 72 bp, Homo sapiens
tgcgcttcctcttaagtatggcattgtgcaatcctcgtttactttggattatgtgataaggactcagctcct

SEQ ID NO: 9592 - DNA, 72 bp, Homo sapiens
ttttcccagggcctctgtcccaaatgctccaggcccgcaggggttaactagagtcccgcccatgagcccatc

SEQ ID NO: 9593 - DNA, 72 bp, Homo sapiens
aaacccaggaggtggaggttgcagggacctgagatcgtgccactgcaatccagcctgggtgaccaagagaga

SEQ ID NO: 9594 - DNA, 72 bp, Homo sapiens
ctgagctctggcttgcaccttctgcacatctagaccgcctttgactttcttactcattcacttccttttata

SEQ ID NO: 9595 - DNA, 72 bp, Homo sapiens
accttttgtctcgctactcgggcgctgcctccatccgtaaggaaaggagaagtggcagagacagcagctgtc

SEQ ID NO: 9596 - DNA, 72 bp, Homo sapiens
agcgggagaatgctgggacgggcagggcaggtccccggccacttgcaggcctactgtctgtccaagctcccc

SEQ ID NO: 9597 - DNA, 72 bp, Homo sapiens
ttgccattgtagtgtcaaagtagccgtagacaatacgtaaatgaatgtgactgtgtcccaataaaactttat

SEQ ID NO: 9598 - DNA, 72 bp, Homo sapiens
gtactttgatctcccagcattgcatttttaatggacgctctcaacattacttcattaagaactttttccagg

SEQ ID NO: 9599 - DNA, 72 bp, Homo sapiens
ggcccggaccagcgcccgtgctcagggcagctgtgcgctccgcgctgccttctggttctgtgtgatggatgt

SEQ ID NO: 9600 - DNA, 72 bp, Homo sapiens
gagaaaagaaacacctgtgtgttgagagaacaaatcgtggctcagtaccccagtttgaaaagagaaagtgaa

SEQ ID NO: 9601 - DNA, 72 bp, Homo sapiens
cctctctttgcctcccagaaaagagtctccctctgcggactcagcttgtgaacagaaagtgaaggcttccag

SEQ ID NO: 9602 - DNA, 72 bp, Homo sapiens
atacaacccattgttattatctatagtcaccatgtcgtgcaatagatttcatgaatgtttcctcctatctaa

SEQ ID NO: 9603 - DNA, 72 bp, Homo sapiens
ggagagtgttattaatatccgccccgtgggtgcggcgctgtgtatttccagagaggggactcggggcccatc

SEQ ID NO: 9604 - DNA, 72 bp, Homo sapiens
gtgtgctgcacagccagcttcctcaaacccactctcgccactgtagctgcccacagaggcacctcccaagcc

SEQ ID NO: 9605 - DNA, 72 bp, Homo sapiens
ttttccgtcagaacgagctttgccctgcactcaggcgtggcgtgatctgacccgacacctccaaccatctgt

SEQ ID NO: 9606 - DNA, 72 bp, Homo sapiens
ttggctgtcgccgggcacagctggagccggaccaccgagctgacctcgggctacgggggcctcttggaacct

SEQ ID NO: 9607 - DNA, 72 bp, Homo sapiens
cggggtgcgtctccagtctgtggggggcagggtctcgtccagacaggaggctgcatggtgctgcttgtagca

SEQ ID NO: 9608 - DNA, 72 bp, Homo sapiens
aagggtcggcactagcagagaccagcaggcagacgcggagcccgctcaaggctaaagcggccgcacctgctg

SEQ ID NO: 9609 - DNA, 72 bp, Homo sapiens
aaagtcccacttgcacgccatgttcacagcagcaccgttcacaatgaccaaaatgcggaagcacctgctgtg

SEQ ID NO: 9610 - DNA, 72 bp, Homo sapiens
atacttcacatatcatgcagttcacccattcaactcgtttcgagtggacagttgagtggtttttaggacatt

SEQ ID NO: 9611 - DNA, 72 bp, Homo sapiens
tggcggaagccaagtccgtgtgggccctgctgcagcgtaacgagttcctgctgctgctgtccctgcaggaga

SEQ ID NO: 9612 - DNA, 72 bp, Homo sapiens
actagaactacctgctatccaagacttgttaaccacgttttcatgggcaaattacaaaaccctttcaacccc

SEQ ID NO: 9613 - DNA, 72 bp, Homo sapiens
gacaatttttttcacataatctctaaagaatcctccgagcatccttaggttagagaaagagggctcctggtt

SEQ ID NO: 9614 - DNA, 72 bp, Homo sapiens
ctgcaggaggcagaagtggccgatgagggcaggggcgggaggtcgggagatcaggagtccacgcaccagcct

SEQ ID NO: 9615 - DNA, 72 bp, Homo sapiens
tccagcgtgccccggggcttgcctcgatccagcaccgattcagcgccaggcccagcccacggtccgtaagtc

SEQ ID NO: 9616 - DNA, 72 bp, Homo sapiens
tgtgtattgttatcctatctttcaggttaggaaaccgaggcttaaagaggctaagtggcacacctaggtctc

SEQ ID NO: 9617 - DNA, 72 bp, Homo sapiens
ctttttctgttttttgagacagagtcttgctctgtcgcccaggctggagtgcagtgacgtaatctccgctca

SEQ ID NO: 9618 - DNA, 72 bp, Homo sapiens
gaaccagtggggttcacgttctcttggggacattacgaagtgtcaaggaaaaggcagcgggtacaggttatt

SEQ ID NO: 9619 - DNA, 72 bp, Homo sapiens
acttgtttttgagacagtctttttgcaaaatgtctcggtatttttgtcttgcataacattgttttagaatgc

SEQ ID NO: 9620 - DNA, 72 bp, Homo sapiens
tccctgtgtggggcctggagatgtgccagacaccccggtgaaggtcctgggcctgccagctgagtccccaag

SEQ ID NO: 9621 - DNA, 72 bp, Homo sapiens
ccctgtggtgaaccagaattgcttcctgatatcatcggtggagtaatagtttcattagggtttggggatgtt

SEQ ID NO: 9622 - DNA, 72 bp, Homo sapiens
aggagaaagaagcctgtcctccccgaggtcagctgcgttagaggaagaagactgggcatgtctgggcagaga

SEQ ID NO: 9623 - DNA, 72 bp, Homo sapiens
aaaagatatctcaaacagcacaaataatggctgatcgttctgcaaacaaaaagttacataatagctcaagaa

SEQ ID NO: 9624 - DNA, 72 bp, Homo sapiens
acagaacaacctggccaatgtgaattttaacactacagcactatggcaaggagttaccacactctgtgaaaa

SEQ ID NO: 9625 - DNA, 72 bp, Homo sapiens
gactctgcagcctgagtgtgtcatcacgacccacccgctgctctgctctcataggtatgacagcacagctct

SEQ ID NO: 9626 - DNA, 72 bp, Homo sapiens
ctgcgcagagtgcgagtgcggggcctccaagcccacgccccggaacccgctgccgcagcgactgccttgtgc

SEQ ID NO: 9627 - DNA, 72 bp, Homo sapiens
cttcttccttcggttcagggcgagcatgtccacggcgtgggcgacgagcaggagcaggcagagtggcgcccg

SEQ ID NO: 9628 - DNA, 72 bp, Homo sapiens
tccactcccctttccttttctaaaaggggccataccggtgacctgaaggagtttgttcagccagggtctatt

SEQ ID NO: 9629 - DNA, 72 bp, Homo sapiens
gtgccccgttgaggcctctgtggctacatctactacgctccactgcagtgatctgcttatcaggccccttct

SEQ ID NO: 9630 - DNA, 72 bp, Homo sapiens
cactgaagcatgagatgccaccttggactatcagccggagccaagctccagatgaaggcagccgtgtgactg

SEQ ID NO: 9631 - DNA, 72 bp, Homo sapiens
cttcagtgcagatacaagactgccctgtttcacagcgggatcctgactgcacagtctcccttccatcagcca

SEQ ID NO: 9632 - DNA, 72 bp, Homo sapiens
cggggatccggagaggacgcgagccacgctgtggccgctcccactcagcgcctgtcccggagggcagaggcc

SEQ ID NO: 9633 - DNA, 72 bp, Homo sapiens
tagaggtggaggactggaagccatccagggcccagcgggagggatttcaggaactggtgaaaagagagatgg

SEQ ID NO: 9634 - DNA, 72 bp, Homo sapiens
ctctatctgagacaaggtatcaaagggatgccttccggtactactaactcaattcagttcattcatcatcag

SEQ ID NO: 9635 - DNA, 72 bp, Homo sapiens
cctgcctcggcctcccaaagtgctgggattacaggcgtgagccaccacgcccagcctgcctgttgggtttat

SEQ ID NO: 9636 - DNA, 72 bp, Homo sapiens
tccttgaccaggaaagggaactccctgaccccttgcgcttcccgagtaaggcaatgcctcgccctgcttctg

SEQ ID NO: 9637 - DNA, 72 bp, Homo sapiens
atgctgcctagcacccatttaatctccttcacttccgtggatagtgtgcatgtgagtaccagttattactat

SEQ ID NO: 9638 - DNA, 72 bp, Homo sapiens
gacccgcccattgcaggaaccctgaggacttcaggcggctgctgttgggaagggactttttccggcagtccc

SEQ ID NO: 9639 - DNA, 72 bp, Homo sapiens
gaggcccggggatcgtggaggctaattcagcgggccgagttgggcctgccccagatgaattcctctggagct

SEQ ID NO: 9640 - DNA, 72 bp, Homo sapiens
aggtgaagaggagacggtggcgtcgggggaggagtcgctgggctttctgtccaggctgccccctggcccggc

SEQ ID NO: 9641 - DNA, 72 bp, Homo sapiens
cctgaaacagaggccagcccactgccttccctccccgggaggacccctcccaatgggccaagccctctctgg

SEQ ID NO: 9642 - DNA, 72 bp, Homo sapiens
ggtaccctgagccgtcccaccttggaacactagttcgttcccctccagcctggaaaatcagcatcacctctg

SEQ ID NO: 9643 - DNA, 72 bp, Homo sapiens
aaacagcgatagagcttcaagtctccctctgccagcgctcccgcccagccctagggcgcacccggcgctccc

SEQ ID NO: 9644 - DNA, 72 bp, Homo sapiens
tactctgaactttgttcatttgttttcttttaattcggcttttttggttgcctttcacctactttttcgcag

SEQ ID NO: 9645 - DNA, 72 bp, Homo sapiens
acacagccttgctacagcggaggcagctgggattccggcctcgcacgcccgagctttagccactgtgcggcg

SEQ ID NO: 9646 - DNA, 72 bp, Homo sapiens
gatctgtaccctctgccaaacgtttacgtgggaggcgggagcgggggctgagggcttcgtcttttctcccct

SEQ ID NO: 9647 - DNA, 72 bp, Homo sapiens
gacctctgacctcacactgcagcctggcctggccacgtccccagggaggggaggaggggaggaaggcctggc

SEQ ID NO: 9648 - DNA, 72 bp, Homo sapiens
tgccctgggctttggctcaggtggtggccacgggccgaacggcaggagggcatgatgggcctgaggactcct

SEQ ID NO: 9649 - DNA, 72 bp, Homo sapiens
cagcatgacaggggaccgcaggtctcgggaaaccccgggggaggaaaagcatgttgtgcattgcaagctgct

SEQ ID NO: 9650 - DNA, 72 bp, Homo sapiens
cttccatctcaggtcaaacagctgtgtgcttggcacgctcaagacaaagttgagcaagatgccaagggagcc

SEQ ID NO: 9651 - DNA, 72 bp, Homo sapiens
attagaccggcctatgaaaggctgtacaatttaaccgctgatgttgcagccgtcgcgcccttctgctggggg

SEQ ID NO: 9652 - DNA, 72 bp, Homo sapiens
cagggacctggcctgagggcaagggaggagcggcacggcggcggctgccttgcgcttccagctcgggccctg

SEQ ID NO: 9653 - DNA, 72 bp, Homo sapiens
tccttggggcagctggggtctttgggaccctccaccgggctcgccggtccgtcggacttttggctgagatcc

SEQ ID NO: 9654 - DNA, 72 bp, Homo sapiens
ctgcctccaggaagactctgttccatccatccaaccgggagccgggagccagtactcacagcccacgtaaga

SEQ ID NO: 9655 - DNA, 72 bp, Homo sapiens
gggctggctggggaaggtaggcccagctctagctgcggaactggagcaggctgtggaggcacagaagtggca

SEQ ID NO: 9656 - DNA, 72 bp, Homo sapiens
ttaggaaacggtagaaatgcccagaggaactaaagcggacctatgtttgctggctttgaattcactgctggg

SEQ ID NO: 9657 - DNA, 72 bp, Homo sapiens
aatgaggcctgtccaacctcctgttccatcatgtccgggaactccatttttaaggtttctcgggggtcccct

SEQ ID NO: 9658 - DNA, 72 bp, Homo sapiens
caactcttcaattttgttttgcaacctacagtccacgcaaactgaacttcctgctcagctgaaatacagcaa

SEQ ID NO: 9659 - DNA, 72 bp, Homo sapiens
ctcatttcacctgcgctgtggacactgagaacatccgccgtgtgttcaacgactgccgtgacatcattcagc

SEQ ID NO: 9660 - DNA, 72 bp, Homo sapiens
gaaattaaaaattgctcaaccagcccaggagtcatcgcagccaccaccaggagtcatcacaagaaagacggt

SEQ ID NO: 9661 - DNA, 72 bp, Homo sapiens
tgtgtggttacagggagaagagtgctatattagtccgttctcatgctgctgtgaagaaatacctgaaaccag

SEQ ID NO: 9662 - DNA, 72 bp, Homo sapiens
aagaactgagaagcttgagacggctgaggccccatcgcctctggaaagcaggggaattttgccctcagggtc

SEQ ID NO: 9663 - DNA, 72 bp, Homo sapiens
tatacattatatttcttaggttgattttttaaagacggagagaaggttacactaacaactcacttgtccctg

SEQ ID NO: 9664 - DNA, 72 bp, Homo sapiens
tagtagagcatgaagccggccgcgtgtgctttgtgcgaaggcctgagaccttggaaagggtggctgaagact

SEQ ID NO: 9665 - DNA, 72 bp, Homo sapiens
ggctcccacccaccccccagccctgggcctccacacgcccagccccatggtcctggagagtcccccgctcca

SEQ ID NO: 9666 - DNA, 72 bp, Homo sapiens
tttcttggattgagtcctcacagcgcggcggactgcggcgtggtaggaactacaccacccagaatactgtgc

SEQ ID NO: 9667 - DNA, 72 bp, Homo sapiens
tgggttaggttcagggtcaagactagaccccacatcgcttggggaaaggaaaggccacggtgtgagagggag

SEQ ID NO: 9668 - DNA, 72 bp, Homo sapiens
agttaagtaacactggacaagtcacagtttctctccgctcatttccttcctgctctctaaaaccaggggaac

SEQ ID NO: 9669 - DNA, 72 bp, Homo sapiens
tacattgttgagacagccgctagcctgagcaaccgcgcctgctctggctgagaatacaaggctccaaagctt

SEQ ID NO: 9670 - DNA, 72 bp, Homo sapiens
agaaattacccgtaagaaaccaagacttttcaacacgaacctcatgacttccacattctatttttgatacct

SEQ ID NO: 9671 - DNA, 72 bp, Homo sapiens
attaatggaatcagcaaaagttgcagggaaaatgtcgctgctgaaaagtgacccctggaaaagaagaagtag

SEQ ID NO: 9672 - DNA, 72 bp, Homo sapiens
catcctacatgaagcaattcctcattgagttctctcgtcctttatccttgttggaaacatcaggcaaagtca

SEQ ID NO: 9673 - DNA, 72 bp, Homo sapiens
ctctctcagcctggtaactgtaaacccagtcaaagcggatgagggaggagtccaatggaagctaaggtccca

SEQ ID NO: 9674 - DNA, 72 bp, Homo sapiens
cttttgtgaattacagcactcaccacgaaagcttgcgagaccacgagcctaccgggaggaacgaacaactcc

SEQ ID NO: 9675 - DNA, 72 bp, Homo sapiens
acgttttaatctttgacaactgacagggtttaggccgtcacccatcccttccctccccccacactttgctct

SEQ ID NO: 9676 - DNA, 72 bp, Homo sapiens
tgtggcagggaagtgccacgcagatgcagagagcacgagagtgaggcctggagaaccaggaggggcttcctt

SEQ ID NO: 9677 - DNA, 72 bp, Homo sapiens
aaatttactagttcctcactgggattctggaggggcgtgtgtgtgtgcatgttgagaattacagaatcattt

SEQ ID NO: 9678 - DNA, 72 bp, Homo sapiens
cactactgccagcccactgtggatgtcagccaggccgacttccccctggaggtgagtgggagccccagtgtg

SEQ ID NO: 9679 - DNA, 72 bp, Homo sapiens
caggcctcctgacacctgagagcagagatgctgtccgtgtcctgggccctggctgcaaaccggaaggcgtcc

SEQ ID NO: 9680 - DNA, 72 bp, Homo sapiens
cgtcaatatcagtgaaatacacccagctggctgcccgccaggccacggctcggtgacagaggccgactgtaa

SEQ ID NO: 9681 - DNA, 72 bp, Homo sapiens
catgggatgtgacttcctccccctgcccagctcaccggtcttagtgttagagatctggtagacctggggcct

SEQ ID NO: 9682 - DNA, 72 bp, Homo sapiens
gaggatggatttttttttcccagtaaacaggcactcggagactttccacaatagaaccatgttgttgctgta

SEQ ID NO: 9683 - DNA, 72 bp, Homo sapiens
ctgggttgctgggactgtggtctgagagaagaactcggaagtggaaggctgggactgcagataggaaccgtt

SEQ ID NO: 9684 - DNA, 72 bp, Homo sapiens
gactggggcctcgagccgagaagcgaagaacaaagcggccgcgttagcccgccgccccgagggacagcccgg

SEQ ID NO: 9685 - DNA, 72 bp, Homo sapiens
tcctttttcagggaggattgctggtcgcggggaggcggcccagtccccggtcaggctggtgcatgttctcaa

SEQ ID NO: 9686 - DNA, 72 bp, Homo sapiens
tgctttacatcagatttaaaagaccccaaataccgcgtcccatcccttcctctgccctctcagcttcctcca

SEQ ID NO: 9687 - DNA, 72 bp, Homo sapiens
tgtgggagtttctgggcagatgtggtgctgagtgccggcctggggtggcctcgattctctccctgcagcctt

SEQ ID NO: 9688 - DNA, 72 bp, Homo sapiens
gtgattggacgaagcagggcgcgggggcgcaagcccgggtcctgcaggggcgacgcgaggcctcttttgaaa

SEQ ID NO: 9689 - DNA, 72 bp, Homo sapiens
cggtgtctgtccttgagagccaggcccaggtctcacggtggcgtatggacagctcctccccataggcctggt

SEQ ID NO: 9690 - DNA, 72 bp, Homo sapiens
atatgggatattctattacacaactggtctggacccgtcaaaattatcaaggtgatgagaccccccctaaaa

SEQ ID NO: 9691 - DNA, 72 bp, Homo sapiens
actgggctcctcaggccttaaggctccagcagacccgggcatctcccccctcccccagttgggttcgagttc

SEQ ID NO: 9692 - DNA, 72 bp, Homo sapiens
tccctggtgtgtccagaattacacaatatcaataacggctgaggtgacctgtgatgcccctagcaccctaca

SEQ ID NO: 9693 - DNA, 72 bp, Homo sapiens
aggatcttccttctcctaaagcctcctaaacctcacggcccacacccagtctctccgacgtgaagggacgct

SEQ ID NO: 9694 - DNA, 72 bp, Homo sapiens
ccatgatgtcaccccaaggccttcccattggctcgcgtcgctctcaggggggcgggcccgcccgtcaccatg

SEQ ID NO: 9695 - DNA, 72 bp, Homo sapiens
aaaaggactgacggaaataccaccactgccaaccacgacagcatcctggttccctaaacggatgggcttctt

SEQ ID NO: 9696 - DNA, 72 bp, Homo sapiens
attgaaagcgcgtttccagggcggaccccggtccccgcctttggccagcaaaagtacattctggcagggagg

SEQ ID NO: 9697 - DNA, 72 bp, Homo sapiens
ctgctcgttcgaattgttctggttccatcttcccacgcctgggggtctggctttgtgtgcgaagaccccttt

SEQ ID NO: 9698 - DNA, 72 bp, Homo sapiens
ggtctccgagtccaccctaggatgtgtggagcgggcgggagccgcttttcctcgaaagggctcccagtccct

SEQ ID NO: 9699 - DNA, 72 bp, Homo sapiens
tgtccttcgggaaatgctcagcctacgcacaccctcgcccccgagcacccggttctgaagaatgggcaggcg

SEQ ID NO: 9700 - DNA, 72 bp, Homo sapiens
gctttctgacccttgcatgcctttggggtggggggcgtgggatttgacaccgtagtttctcttctcggttgg

SEQ ID NO: 9701 - DNA, 72 bp, Homo sapiens
tccttcactttccgcaagtttactctgcagttgatcgtcgaaggtggtggaaggtttcattttcccggaagg

SEQ ID NO: 9702 - DNA, 72 bp, Homo sapiens
ggagaggcccggacgggtgggggttgtcccacttccgaaagaccccaggttctaggtgtgggggcgaggcct

SEQ ID NO: 9703 - DNA, 72 bp, Homo sapiens
tggcaggatcccaggaacactctactctggcctcacgtcccgcatccgtccattgcatctgggcacatattc

SEQ ID NO: 9704 - DNA, 72 bp, Homo sapiens
tgcaggctgagtggccctgcagagggccatggaaccggataagttcctctgggagggaggcagatgccagga

SEQ ID NO: 9705 - DNA, 72 bp, Homo sapiens
gattcgtagctaagactctacgacatccctgaagccgggaaatggtgagtgtgccgggcagggcgtccggag

SEQ ID NO: 9706 - DNA, 72 bp, Homo sapiens
ttgagtctcggcccagtgcaagttctgggaaggaacgtctttgtatatatgagggacgtatgctgccttttt

SEQ ID NO: 9707 - DNA, 72 bp, Homo sapiens
cattcaaaagaccgccgtgtcaggggttcagctaacggtgcagctactgggtgtgtgtgtgtcttcccggag

SEQ ID NO: 9708 - DNA, 72 bp, Homo sapiens
ttggagagaaagaggaaatttacaaaagcataaaacgtggttctgtttttctcagggaccttagttaaggca

SEQ ID NO: 9709 - DNA, 72 bp, Homo sapiens
tggccagcagcaaaagaagccccccaaccataccacgccggagggggatcataaggaggccaggtaggcaaa

SEQ ID NO: 9710 - DNA, 72 bp, Homo sapiens
tggctgagtgaacagcttcatcacggctggctggacggatcctgcatccctggcctggggctacacgggcga

SEQ ID NO: 9711 - DNA, 72 bp, Homo sapiens
gggagtcccagatgcacttgttccagtacctccctcggcagccattcaagcggggaagtcgctggaggagcc

SEQ ID NO: 9712 - DNA, 72 bp, Homo sapiens
caagggcggcgagggctcaaaagtcctggataatccgcagatagaacacacacacccttttccgaattctgc

SEQ ID NO: 9713 - DNA, 72 bp, Homo sapiens
actggaagataggaaagcaagcatgaaaaagcagccgggtcagacaggcttctggattcagtgtgtggacat

SEQ ID NO: 9714 - DNA, 72 bp, Homo sapiens
acagacagcacacattcacaggaactactcaaccacgtaaccactactccctgtcatgatgtgttatgacca

SEQ ID NO: 9715 - DNA, 72 bp, Homo sapiens
cctttattctctgacagcggccagctcctagggcacgcttggtgcgtggggacactcaacagggagatgctt

SEQ ID NO: 9716 - DNA, 72 bp, Homo sapiens
tggctcactgagattcatgagtatgcccagagggacgtggtgatcatgctgctaggcaacaaggtgagtggc

SEQ ID NO: 9717 - DNA, 72 bp, Homo sapiens
cagacattgtttgagaagatcgctgtgctgacacccggagctttccgcttgcagttggggctgggtaggtta

SEQ ID NO: 9718 - DNA, 72 bp, Homo sapiens
aaaacccaagacgggggaatgggaacctcacaggacgtgggggcgcttttctggccatctctatataaaacc

SEQ ID NO: 9719 - DNA, 72 bp, Homo sapiens
ggcagtctaaagcctggctcccttccggcctggcgcgctacggttcccgcaggcgctccgcttcagcaccgc

SEQ ID NO: 9720 - DNA, 72 bp, Homo sapiens
gtaactgttgctggacaaccacatgtctcagcacacgtaggcacgcccccacacttgtgtgcgtgcacacac

SEQ ID NO: 9721 - DNA, 72 bp, Homo sapiens
acctcagacacacctgatttgaatcccagccccaccgttctttgccaagaatgaaaacgtggtgggaccagg

SEQ ID NO: 9722 - DNA, 72 bp, Homo sapiens
gtggtgaaccgtctgcagggccagaccttggagcacgcctccactgccctcccggaactggatgtgctgagc

SEQ ID NO: 9723 - DNA, 72 bp, Homo sapiens
ggaaattcaatccacatgtttctgattcatttacacgtaaatcatccaaatgttgttttgcaagagcctttt

SEQ ID NO: 9724 - DNA, 72 bp, Homo sapiens
aaattgcatcattggtttcctctctcacttgttctcgttttttattttattgttattcagtgcaaaacaaaa

SEQ ID NO: 9725 - DNA, 72 bp, Homo sapiens
cccttatgtgccgcaggcctccgcttctgcaaccccggctgggacgccttccagggcgcctgctacaagcac

SEQ ID NO: 9726 - DNA, 72 bp, Homo sapiens
tcttggcccagaaattttccagttctcctactttccgcgccttcttcgtttggggtgtggtttgagtgcttt

SEQ ID NO: 9727 - DNA, 72 bp, Homo sapiens
tattctatcattgggtatagttcctcggtagaaaacgggccttatccccacaggaagcagtgggtttgttat

SEQ ID NO: 9728 - DNA, 72 bp, Homo sapiens
agattccgacaccaagtgcagccactgtgcggggccgggtgtggagtggccccacaccgaccagctcacgcc

SEQ ID NO: 9729 - DNA, 72 bp, Homo sapiens
aatcacaggtgtcctgttttgtgctaggcatgctgcgtatccagtagtactaagaacagctgccatttattt

SEQ ID NO: 9730 - DNA, 72 bp, Homo sapiens
actaaaggggagaccgagaaccccgggtcaggaagcggagagctaaaacgacaaccgtgggtcagcggaggc

SEQ ID NO: 9731 - DNA, 72 bp, Homo sapiens
ccagtacctgggacttacgtagtaagagtggggcgcggggggcgggggcggggggcagcagcaggaagggga

SEQ ID NO: 9732 - DNA, 72 bp, Homo sapiens
attttgagacttccctaaggcccccttctctagtacgcaatcgcggattcaccagcttgagtcagttggcct

SEQ ID NO: 9733 - DNA, 72 bp, Homo sapiens
aaaaagatggcagtcgtatccaactcccgagacggcgaacccgcaccatttccatgcgcgctctgtgcacaa

SEQ ID NO: 9734 - DNA, 72 bp, Homo sapiens
caggctcactcttccacactgttaggaagcccctccgctctttccagagccagaaagtagtagttttggggt

SEQ ID NO: 9735 - DNA, 72 bp, Homo sapiens
caggctctggccttgaaacattcaggcccctcagacgccaccgcggccaagctctcatcctgcctctttcct

SEQ ID NO: 9736 - DNA, 72 bp, Homo sapiens
atctgtgctggatgtcacctggctccatccagtgacggattcatattctctgtttcgacatcttcagttgct

SEQ ID NO: 9737 - DNA, 72 bp, Homo sapiens
agtcccgttactggtcttcaggcgaaattccaggacgggtgtgcattcatcaacctgggagtctctaggagc

SEQ ID NO: 9738 - DNA, 72 bp, Homo sapiens
tagcgtaaatgcccttaagaatgtctccttgtagccgggcgtggtggctcatgcctgtaatcccagcacttt

SEQ ID NO: 9739 - DNA, 72 bp, Homo sapiens
aggcatcaggagttatccaatgtgacttccaaagacgccttgaaaaggttttctgctaacgaaactcttctt

SEQ ID NO: 9740 - DNA, 72 bp, Homo sapiens
cacacgtgtgcatgtgtgcactcagtgtacgtgtgcgtgcctgtgggtagctccgtgcgcacatgcgtacac

SEQ ID NO: 9741 - DNA, 72 bp, Homo sapiens
gccagcctctgccacttggacacagccaaggcatccggcacggtggtgaccctgcatccctcccaccatagc

SEQ ID NO: 9742 - DNA, 72 bp, Homo sapiens
gggacacgggcgcttcttctctccagcccttggttcgccggagcaggatgctggtctcaacactagggctat

SEQ ID NO: 9743 - DNA, 72 bp, Homo sapiens
tccttctgatagaatttttccagcagatgttatcacgtactgcagggaaattggatctgcgtgctggcctta

SEQ ID NO: 9744 - DNA, 72 bp, Homo sapiens
ctggcagccggccaatgtccaacctatgtgaggaacgacagaatagcagaatgaccagacatacagaaagaa

SEQ ID NO: 9745 - DNA, 72 bp, Homo sapiens
cagcatgccaccatgaatcagcaatatcagatgcccgcccactttgataggttggtatgttctcctaacctt

SEQ ID NO: 9746 - DNA, 72 bp, Homo sapiens
gaaccgtcctgaaccttactctgtcctcccgcccccgccaaaaaagaagacagaaagagaaagaacaggaaa

SEQ ID NO: 9747 - DNA, 72 bp, Homo sapiens
cgtggggctgggctggctgtcggcatgtgccctggcgcaggcccaggtctcatcacgcaccctctgtccctg

SEQ ID NO: 9748 - DNA, 72 bp, Homo sapiens
tgcatgcccagcccctgccttcctggagcccatgacgcaggggccatccctgaccacagcagatttcatcga

SEQ ID NO: 9749 - DNA, 72 bp, Homo sapiens
atggcttcctggggtgttttcaagcttttgggtggcggcacagtctgcaagagggggaaaggctctgagaac

SEQ ID NO: 9750 - DNA, 72 bp, Homo sapiens
cgtgggagccaccaggggaggcgcctcagaccggccgaggggagtgggtgtcccagcacacacatcaagtgg

SEQ ID NO: 9751 - DNA, 72 bp, Homo sapiens
caaagaccacttagattccaggaagagagaaaaaccgtgtcaacagtgataaatctggagacagaggcacca

SEQ ID NO: 9752 - DNA, 72 bp, Homo sapiens
atgccagagcctggcctatgtcactgcctcctgtgcgtacctttgatctacctcccaaatggccagtgatga

SEQ ID NO: 9753 - DNA, 72 bp, Homo sapiens
ctggggctagaggtaccctgcatatgtgcagctgccggggagaggggtactgagcacatgtttgtctggcac

SEQ ID NO: 9754 - DNA, 72 bp, Homo sapiens
ggagcctctctgccacctgcgaggttcagccaccccgtccccactccggaacacattgaagctgagcaagga

SEQ ID NO: 9755 - DNA, 72 bp, Homo sapiens
actgccttgcacccccgggagctggggaacagacccgcacagccgtgaccacctgaaagccagatgagccag

SEQ ID NO: 9756 - DNA, 72 bp, Homo sapiens
atccagctgactatggaaaggatcaactttaacttcgtatacacagtatttatctgtggcattaaaggtaga

SEQ ID NO: 9757 - DNA, 72 bp, Homo sapiens
gacccggggaaagcctcagctcggccactctttgccgcgtgaccctgggtggcaccttctaagggtgattct

SEQ ID NO: 9758 - DNA, 72 bp, Homo sapiens
ccgtcggggtgtctggtggccaccagctctgctggcgtgggcaggtgtgacccccaccccagggacagccgg

SEQ ID NO: 9759 - DNA, 72 bp, Homo sapiens
gagctgtgctggatccgcgccccctgccttggcgccgcctctggccccctgagccgtggcccatcccatgca

SEQ ID NO: 9760 - DNA, 72 bp, Homo sapiens
gaagagctggatagagggaggaactgggtagacctcgcaatacaggctgttgcaacagaggccttggctgat

SEQ ID NO: 9761 - DNA, 72 bp, Homo sapiens
cctccatgcccaaggtgtctggagcagggctgacacgcctgggtccttcaacctcagaggaaaccgaaattg

SEQ ID NO: 9762 - DNA, 72 bp, Homo sapiens
cagctggccactgagagacccatccccctcagcaccgtggcttcccagctctccctgtcctcctccccccga

SEQ ID NO: 9763 - DNA, 72 bp, Homo sapiens
tggtggcagacggcccacatggcctggccgtgcaccgtggctgccccacgcacaccctgatgagctcgctgt

SEQ ID NO: 9764 - DNA, 72 bp, Homo sapiens
tagcagtgtctcaatacaaagcacaacaattaatccgcaggcaaagtggatggtcacgttcaagattatagc

SEQ ID NO: 9765 - DNA, 72 bp, Homo sapiens
cagtcttccaggtcacgcagggtcactgcgcttcacgtggccctgcagcaccaagaatatgcagggccttgc

SEQ ID NO: 9766 - DNA, 72 bp, Homo sapiens
aaaaagccgctttttactgtgccacacagtcaactcgtttgatcctcacgcaagagttagaatgaacaatag

SEQ ID NO: 9767 - DNA, 72 bp, Homo sapiens
cactagcctggtataaaggctgtataataattccacggtaggtaaaactcaaatgtcctagctctcaccagc

SEQ ID NO: 9768 - DNA, 72 bp, Homo sapiens
caccctgagccccaaaccacattctgttccttcctcgtcattctgcagacaatggtcatccacagaccacac

SEQ ID NO: 9769 - DNA, 72 bp, Homo sapiens
cattacagttcttccgtgactttcacccttggtgacgctgcgcgccccttcccctttccaaatctctagcaa

SEQ ID NO: 9770 - DNA, 72 bp, Homo sapiens
tgccgctgagttggaagacaacagctgctaacacacgaagcctcagaaagccctcgccaggactcagagatt

SEQ ID NO: 9771 - DNA, 72 bp, Homo sapiens
gcttgggtagagacaaatccgattgtccacgtccacgttgggaaatcgcaggtagccccctgccagccctgc

SEQ ID NO: 9772 - DNA, 72 bp, Homo sapiens
tcccagacccaggaagctggccctgtgtatgttatcgtgaggcagggcccccgagagcctcccatcccatga

SEQ ID NO: 9773 - DNA, 72 bp, Homo sapiens
tcaacagttagttattcagggatttggggcacaggcggttgtgaccacatcacaaaagttcaatttgttggg

SEQ ID NO: 9774 - DNA, 72 bp, Homo sapiens
aaatatctggggttcagttctataattagcagcaccggataggacgcgagccaaacctctcttaaccctagc

SEQ ID NO: 9775 - DNA, 72 bp, Homo sapiens
actgactggagttcctctttctgctcacacttagacgtctaagagtaagtagtgagtcaggcagggtcccag

SEQ ID NO: 9776 - DNA, 72 bp, Homo sapiens
aaagtactttcaggaaagaggaactaatagcaatgcgtaaaagatattcatgtctgcttggctataatatag

SEQ ID NO: 9777 - DNA, 72 bp, Homo sapiens
agcgcagccgggtgggggtgccccggcagcagggccgggaggggcgtggtgggggggcctcggcagcgtggc

SEQ ID NO: 9778 - DNA, 72 bp, Homo sapiens
gcgagccctggagaccggggccctgggtgtgcggtcggctcagtgccacgcggtgagataggcatggttatc

SEQ ID NO: 9779 - DNA, 72 bp, Homo sapiens
tgcctcggagccatggaatggtttcaacaactcctcgacaaggccaagttggtatttatgtctcatcaaacc

SEQ ID NO: 9780 - DNA, 72 bp, Homo sapiens
ggtcacagagcttaaaggtgacacaacagtgctcacgtaaaccaacacacattccccaccccccaagccaac

SEQ ID NO: 9781 - DNA, 72 bp, Homo sapiens
aacaatatgctcttgcgtgccatttgttgcatgcccggtttttatttgacagtcagaaattcacatgccttc

SEQ ID NO: 9782 - DNA, 72 bp, Homo sapiens
tttcctccatgtaaatcatcacttccctttctgtgcgaacactgtctcaagaacataattccttatcatggc

SEQ ID NO: 9783 - DNA, 72 bp, Homo sapiens
aaagtagggttagtacaggaaatttgggccattcacgagtaactccatattgagtgtgtgccaggcacagtc

SEQ ID NO: 9784 - DNA, 72 bp, Homo sapiens
tagctcagtgagacctccaggttctgtctgagttccgtctccctatgctgcaacctggaaactcttcaggcc

SEQ ID NO: 9785 - DNA, 72 bp, Homo sapiens
cagacttcactaaaggtccacagtgaatgctgaaacgtccaagctcaggaccggctataaactcggcagtac

SEQ ID NO: 9786 - DNA, 72 bp, Homo sapiens
aactccaggcgcagggcccagcaccaagtgagcatcggaaaatgctggacaggacactgtggcggctgctgc

SEQ ID NO: 9787 - DNA, 72 bp, Homo sapiens
actgggcgaaagacactgcccctcatctgtaaaaacggggatgggagagaacgttctcttggtttcctgcca

SEQ ID NO: 9788 - DNA, 72 bp, Homo sapiens
ccgattcattcatatagttatctgaatggtgctcccggacattggactgtgtacaacttgcacatatgtttg

SEQ ID NO: 9789 - DNA, 72 bp, Homo sapiens
aataaaaataatacatacgtcctgttctgcagacgcgtataagtcacagaaggaaacacaagtgacaggaca

SEQ ID NO: 9790 - DNA, 72 bp, Homo sapiens
catagagctcacgcaccaggcagccgctgtggcctcggaggacagaggtggcctctccagggcttccgcgag

SEQ ID NO: 9791 - DNA, 72 bp, Homo sapiens
gatttgaagcatcagctcctgctgtggctggaaatcgagctcggaagatgtcagttgcagctctgtgacctt

SEQ ID NO: 9792 - DNA, 72 bp, Homo sapiens
agtcagatcggcacaggaaatgagcacctttgaggcgtccactctgtaggggctcgtcaacagtagactggg

SEQ ID NO: 9793 - DNA, 72 bp, Homo sapiens
tgctaaatttctgattttacacacatacacacacacgcagaggagaaaatgtaagctacctaacataaaaca

SEQ ID NO: 9794 - DNA, 72 bp, Homo sapiens
agaagtgttcttcagtgcaacacatctctggaggccgcttaagccagcctctgtgttagtcatcactatatt

SEQ ID NO: 9795 - DNA, 72 bp, Homo sapiens
ggcctcccagcaggtctccctgcttttccctctctcgcctccctctcctcacctcccctcaccctccagtct

SEQ ID NO: 9796 - DNA, 72 bp, Homo sapiens
gcgcccaagccccaggccccacacccacacacaggcggcgacgcacccagctgcacacaaagacccagcgta

SEQ ID NO: 9797 - DNA, 72 bp, Homo sapiens
gctttgttcagggagggctcaaaccccccaccgcgcgcgcctttcccatgcacacctccacccgccccgggc

SEQ ID NO: 9798 - DNA, 72 bp, Homo sapiens
gggaggatcacctgagcctgggaagttgaggctgccgtgagccatgatcactaatgtacttgagcctcagag

SEQ ID NO: 9799 - DNA, 72 bp, Homo sapiens
agtagtaaacaccaaacgggtttctcctgcatgggcgcctgatgcaataatttgccttagctacagagggtg

SEQ ID NO: 9800 - DNA, 72 bp, Homo sapiens
gggtgctcctagccttgtcaccggacaccgaagggcgtcacgggcagtggctggcggtgtccttctgagcta

SEQ ID NO: 9801 - DNA, 72 bp, Homo sapiens
cactgaaagcgatgaaacaaagctactccgcaaggcgactacactcattctttgggctcccaaggctgagaa

SEQ ID NO: 9802 - DNA, 72 bp, Homo sapiens
tcttgtatattccccacaaagccgttcgcagcttccgggagaaggggccagagcccggtggggccagtttct

SEQ ID NO: 9803 - DNA, 72 bp, Homo sapiens
ggggaggagggccgaagagagaagggacccaggcgcgaagagctggcctggcttaccctgtagccccggctg

SEQ ID NO: 9804 - DNA, 72 bp, Homo sapiens
cactgaaatcccagtcatgaaaaattaagacattccggccataaactgtgcaacaagacacttccagttagt

SEQ ID NO: 9805 - DNA, 72 bp, Homo sapiens
agccctaggattggggcgatggccccggcctcttccgttgtgaaggggaagcggaaactcagtctctggctc

SEQ ID NO: 9806 - DNA, 72 bp, Homo sapiens
aaaaatggtagcaattggccgggcgcagtggctcacgcctgtaatcccagcactttgagaggccgaggtggg

SEQ ID NO: 9807 - DNA, 72 bp, Homo sapiens
acctgagactgaaaccttatccagaactgctgcatcgtgactcatctttgttgaaggaaaatgctgtgcgat

SEQ ID NO: 9808 - DNA, 72 bp, Homo sapiens
gggcattcatttctccctttcttgttaaggaactacgctgttgaatactcacttggaccacccatagctctt

SEQ ID NO: 9809 - DNA, 72 bp, Homo sapiens
ggaaaaaagcaactcatccttttctgctaacaccacgaaggagataaaggaagatttatgagtcatctcgga

SEQ ID NO: 9810 - DNA, 72 bp, Homo sapiens
ggtttggtttccgagtctttcaaccaaagggatctcggtagaagcaggcagttgtgcaactggggcccaggc

SEQ ID NO: 9811 - DNA, 72 bp, Homo sapiens
ggaggtgggagcagaactcacagggaaggatctgacggcatcgcctcccatcagcaccttctgtcctggtcc

SEQ ID NO: 9812 - DNA, 72 bp, Homo sapiens
ttcttatactctcaggcaaactttgaacccgagctcggcttcaacagggagctggactctatcagtggcccc

SEQ ID NO: 9813 - DNA, 72 bp, Homo sapiens
cttcctcactggagatatgtttgaacatatgtttacggaggagttctttctgagcccactttcaggcaggca

SEQ ID NO: 9814 - DNA, 72 bp, Homo sapiens
catcttgctatttcctggattactcaatctgggcgcgggggggtggggggatgcaagttaccatgccatgag

SEQ ID NO: 9815 - DNA, 72 bp, Homo sapiens
gccccatctaagacgacagcagaggttcctgggcccgaacatctgagccaggctgcgccgggggcgtcagac

SEQ ID NO: 9816 - DNA, 72 bp, Homo sapiens
acgtccctctcctttctaccacctcttttcaggtacgcaaaaaacactccagggaggagggaggcatgaagc

SEQ ID NO: 9817 - DNA, 72 bp, Homo sapiens
ccgccagggtccctcactcccgagttctcaaagggcggaggggtttgggaggccgtctggttacctattaac

SEQ ID NO: 9818 - DNA, 72 bp, Homo sapiens
tcagcactaggaggtaactaaaaagccatttgtgccgtaggaagtttgcccagttacctgcttacttggata

SEQ ID NO: 9819 - DNA, 72 bp, Homo sapiens
gtactagtattatccccattgcacatgacaggaaacggaagctcagagaggttatgtaacttgcccaagttt

SEQ ID NO: 9820 - DNA, 72 bp, Homo sapiens
tctgtatacatttgtcaagcaggaagctgggtctgcggggagtagggtggggctggttctcccacacgcttg

SEQ ID NO: 9821 - DNA, 72 bp, Homo sapiens
gccagctcgagccctagaggcactgccattctccacggggccacatggccgcctctgcacccagctgttccc

SEQ ID NO: 9822 - DNA, 72 bp, Homo sapiens
gggaaggagagagaaaccaagagaaccggttcccccgccttgacagcggaggccctcacaccgaggcccttg

SEQ ID NO: 9823 - DNA, 72 bp, Homo sapiens
tgaccttaggacaatcatttgaccactttatgcctcggtttcctcatctgtaaaacaggaataaaaatgtgg

SEQ ID NO: 9824 - DNA, 72 bp, Homo sapiens
ctctggtaattttgggcttgctgagactcaatgcccggggtgagagaagctccccaggcagcatgcctcctg

SEQ ID NO: 9825 - DNA, 72 bp, Homo sapiens
caactgctctccacacattctggtgagtgcaggaacgcatgagctctgcttcccttcagctgagtcacttca

SEQ ID NO: 9826 - DNA, 72 bp, Homo sapiens
accagagaccaggcacagctggagcctccttcctgcgctcagtccccagcgtgactgctgaccctgaccagg

SEQ ID NO: 9827 - DNA, 72 bp, Homo sapiens
gggaggaaggtggatgggccgcaagatggccctggcgtctgcggaggagtagctgagtgagagagcaagagt

SEQ ID NO: 9828 - DNA, 72 bp, Homo sapiens
gcagggagccgcggtggccagtgccgccgctgctgcgggatccattggcctaggataccatggaggaggcgg

SEQ ID NO: 9829 - DNA, 72 bp, Homo sapiens
ggttcatcatagagagagcgcggaccgtgtgcgggcggtcttgacgaaagaaccgagagatggatgcgctaa

SEQ ID NO: 9830 - DNA, 72 bp, Homo sapiens
ttcgagccaaggagctgaacaggcagcaggggccacgtcatgcagggggccttgtagttcctgttagggaat

SEQ ID NO: 9831 - DNA, 72 bp, Homo sapiens
aatgccggcatctccttcggaaccgcaggggttttcgtcccctccccatccggagcagcctctttgctaggc

SEQ ID NO: 9832 - DNA, 72 bp, Homo sapiens
tttgttctaggctcctgttaaaactagcagctttgcgatcagtcagtaaatggactagagttgcataccaca

SEQ ID NO: 9833 - DNA, 72 bp, Homo sapiens
atccatctgtccactgttcctgggcttccatctcccgacaccagaatcctcagagaagaaacccctccagct

SEQ ID NO: 9834 - DNA, 72 bp, Homo sapiens
cacaggtgcctgaccctggctgggggaactgacttcgtgttgaatgccaaggcttgtgagcacccaactgtc

SEQ ID NO: 9835 - DNA, 72 bp, Homo sapiens
taactgtgcaaacacaggccaggcgcggtagctcacgtccagtaatcccagcactttgggaggctgaggggg

SEQ ID NO: 9836 - DNA, 72 bp, Homo sapiens
catgcactcggtcagcttcagctgacgctgccagacggctttccaaagtggcgagcctcatttacaacgtca

SEQ ID NO: 9837 - DNA, 72 bp, Homo sapiens
cctgtctgctggtttctccctcgctgtgaaactgccggtagatctgttgaaggagaaggctgacctggtaaa

SEQ ID NO: 9838 - DNA, 72 bp, Homo sapiens
gcgtcctgacgctgtgggcagaggggatggtacggcgcccacctcccatccctttccctctacactcgcctt

SEQ ID NO: 9839 - DNA, 72 bp, Homo sapiens
cacaacctcccacctggggaaggatgagcgcgcagcgtgccctgagaaaacacaccctccctgcaaggttgc

SEQ ID NO: 9840 - DNA, 72 bp, Homo sapiens
tccctaccaacacaggcttcatcagaggcagggcacgagagccgaggcttctccgcagttctactctaacat

SEQ ID NO: 9841 - DNA, 72 bp, Homo sapiens
gtcgccttgttgtacaggagctgggagtagatctgcgtggtatctgttttgcaatgcagggtcctgaggcca

SEQ ID NO: 9842 - DNA, 72 bp, Homo sapiens
aggacaccgtcctagggtataacctggcaataaaccgtgcctctcactgtgcctgttgctctagctgtgtct

SEQ ID NO: 9843 - DNA, 72 bp, Homo sapiens
gctactatattctcaccgagtgaggagccactgcacgtgccttttaaagctttcaaaggagggctgagtagt

SEQ ID NO: 9844 - DNA, 72 bp, Homo sapiens
tctatagcacattttcaatatgctatttccagccacgtgctcagcccagcaagctcttcctagcattgtttt

SEQ ID NO: 9845 - DNA, 72 bp, Homo sapiens
catccctgctctgctcagctttgacttggggcgggcgcgacgccgcgattttacaaacccaagtaataggcg

SEQ ID NO: 9846 - DNA, 72 bp, Homo sapiens
aactgctcgcggctgagtcgctgagcctctcaaaccgcctgcttcccccaaacagagccacggcccagccgg

SEQ ID NO: 9847 - DNA, 72 bp, Homo sapiens
aagccctgcttgttggtgcctgcgtgcatgagccccgagaacaggctatcgttttgaaatttattctccagg

SEQ ID NO: 9848 - DNA, 72 bp, Homo sapiens
gagatcagagcagggctggggagtgaggagagcagcgcttagtgcttttgaatgatgaattcctgcccttag

SEQ ID NO: 9849 - DNA, 72 bp, Homo sapiens
tttaggccctgggtttcccaagtctccaacctgatcgttctttctgaccatttatgacaacttctggttttt

SEQ ID NO: 9850 - DNA, 72 bp, Homo sapiens
gtcaggagacctggggcggttttgaggcaagctcacggaggcctgccgcagggccctgcgctgacaaacctt

SEQ ID NO: 9851 - DNA, 72 bp, Homo sapiens
caaactccttgtctcttcagtgaattcagaagatacgtgaagcactgaaggaatttttctttgtgtacaagt

SEQ ID NO: 9852 - DNA, 72 bp, Homo sapiens
ccaattgtttccagagagtgtgcaggacatttctccgcagccatcttttgcagtgggccacgagggtgctga

SEQ ID NO: 9853 - DNA, 72 bp, Homo sapiens
tgccctgccgggcaggggaaggaggaggtgctcttcgagctgttggtgtccagggcactgggaatcgcagcc

SEQ ID NO: 9854 - DNA, 72 bp, Homo sapiens
cccattggtcgctgcctcctcgcgtcatccctccgcgccggccgacgcgccagccaccacgtctcgagtgca

SEQ ID NO: 9855 - DNA, 72 bp, Homo sapiens
ggggttagtgagacaaagtgtatgaaaagcataaacgctgaagtgccatgttggtattgcttagcaacactt

SEQ ID NO: 9856 - DNA, 72 bp, Homo sapiens
taataactaccctctgtaaggttcttgtatcggttcgaaccctgcgagcgcgccgacacacaacacgaggcg

SEQ ID NO: 9857 - DNA, 72 bp, Homo sapiens
aaattattgcttcaagcaaattacatacacactagcgacattttctttcaagccgggaggaaatcactcaac

SEQ ID NO: 9858 - DNA, 72 bp, Homo sapiens
cagcccacggaagggctctttcacagctggcagagcgagaggtaggcggcctccctcggggcagaggctggg

SEQ ID NO: 9859 - DNA, 72 bp, Homo sapiens
tagaacttgggggtggggtgggagcagggtgacgtcgcccagctggtggccagagctagctctggctcttca

SEQ ID NO: 9860 - DNA, 72 bp, Homo sapiens
tccctccaccctcatcctggcaggggttgggccaccgttgcttcatcaagtgtcgtggagcctccgctctgt

SEQ ID NO: 9861 - DNA, 72 bp, Homo sapiens
tctggctcggcctgttggcttgcctttcagctgcacggtggtgtgtcttgtgaccagaacatccgtgacata

SEQ ID NO: 9862 - DNA, 72 bp, Homo sapiens
cagtccctggccctgtgtgatgggatgcagactctcgggtcctgtccaaggattgccaattatgcgtccaac

SEQ ID NO: 9863 - DNA, 72 bp, Homo sapiens
gacaggctgaggctcaaggaaggtggtcctcagctcggctggccgggcagcccctcctccgctgtggcccgc

SEQ ID NO: 9864 - DNA, 72 bp, Homo sapiens
agcaacaaactttgcaagttacaaacgggccgcaccggtggcaagcagcagcagggcatctcccgctccgag

SEQ ID NO: 9865 - DNA, 72 bp, Homo sapiens
gacaggcggagtgaggctgctcgggtcacactctccgctcctctagcttgcagccctgctctctcctttctg

SEQ ID NO: 9866 - DNA, 72 bp, Homo sapiens
tgtggtgtgagtgctgtctccatagcctgcactctcggagactgctccggtgctcccctacccccatctcat

SEQ ID NO: 9867 - DNA, 72 bp, Homo sapiens
cagccatccaggctcaaactaaacttcagatttaacgggttttctgtgttagaaatcttggaattgtaggag

SEQ ID NO: 9868 - DNA, 72 bp, Homo sapiens
agcctcgtggcaccaccacagttggcttctcaagtcgggaggctgactccttgaaccgggcgcctcacttca

SEQ ID NO: 9869 - DNA, 72 bp, Homo sapiens
caaagaccagtttccttatttacaactccccccaccgcgcaagtggaggaggagccagccgcgcccaggtca

SEQ ID NO: 9870 - DNA, 72 bp, Homo sapiens
atatgattatcaaaaggagtgcaggatggattagccgagcaacgacctagagtctgagaaacgggcaggcac

SEQ ID NO: 9871 - DNA, 72 bp, Homo sapiens
aaattcattttcattaagtatctgttgtaaccaaacgttgtttcttagcttcttagctctgtaatatggcac

SEQ ID NO: 9872 - DNA, 72 bp, Homo sapiens
gcttagaaactgggactgggacattaataagcttgcgtgagatcaaactaaccagcttcttctgtggaggaa

SEQ ID NO: 9873 - DNA, 72 bp, Homo sapiens
tagaaagttggcccgggaagctcaaggagggagagcggcagaggggaagactctgcaattctgcttgccccc

SEQ ID NO: 9874 - DNA, 72 bp, Homo sapiens
aagtactcccccttgttttgcatgaacaaagagggcgccctgggtttaggtctgggaagccccagcgcagct

SEQ ID NO: 9875 - DNA, 72 bp, Homo sapiens
gggcttcctacagccagagggacgagctagcccgacgatggcccaggggacattgatccgtgtgaccccaga

SEQ ID NO: 9876 - DNA, 72 bp, Homo sapiens
tgaaactgaaccttagcagtttgacttcaagcctgcgttcttaacctttatgattatctttgcatatttttt

SEQ ID NO: 9877 - DNA, 72 bp, Homo sapiens
catgtctcccttccacctttgttgtggtttgtaaacggaaacaaaaacaccagccagcatccgtgtggtgct

SEQ ID NO: 9878 - DNA, 72 bp, Homo sapiens
atctgtattagtgcctactctgccactgtgttgggcgggaatctgattttgttctttggttggagatccaag

SEQ ID NO: 9879 - DNA, 72 bp, Homo sapiens
gacctcctctctgggcctgcaaagacccttcctttcgagccatcactctgggccagaagcagtgagcctcct

SEQ ID NO: 9880 - DNA, 72 bp, Homo sapiens
taggcttttgtggattggcctggggacttagccgccgtatataaatgttattcgagtgactgtacagcattg

SEQ ID NO: 9881 - DNA, 72 bp, Homo sapiens
cccaatttcagcctcccaaagtgctgggattaccgcgcccagcgtgaactgctttgaaccatattgtctact

SEQ ID NO: 9882 - DNA, 72 bp, Homo sapiens
acggctgtttttccttccttcctcctgagggccaccgtgaaccactccccccaccgcatggccttaaatgct

SEQ ID NO: 9883 - DNA, 72 bp, Homo sapiens
aagagatcaggtacagattttaattcattgttccacggttcttttttttaaagagtgttctttaaaaaaacg

SEQ ID NO: 9884 - DNA, 72 bp, Homo sapiens
agtggccaggttgtttttgttttttttttttataccgatacttagtatttggtgaagtaagaaaaatagggc

SEQ ID NO: 9885 - DNA, 72 bp, Homo sapiens
acagttagcggctgctattatgtcttgtaacattgcgacgtcgtgtccttcctcttctcctccctgtctctc

SEQ ID NO: 9886 - DNA, 72 bp, Homo sapiens
atgggagtaccgctatgaatctttatgaatacaaccgtgtactgtgcaatgcaacaaacaagcaacagacac

SEQ ID NO: 9887 - DNA, 72 bp, Homo sapiens
tgtcagacactgaaattgaggaagagagattttggcgttctgttggtttatggagagagttgatcagagatt

SEQ ID NO: 9888 - DNA, 72 bp, Homo sapiens
cttctcccccaggtttgcacagcaactcaagccaccgcaaagctcacctttgtagcctttgcccttggtcac

SEQ ID NO: 9889 - DNA, 72 bp, Homo sapiens
acgtataagggcaagtccttagagatccagaaacccgctggtgagagtcctgcaaagatgcttctgatggtt

SEQ ID NO: 9890 - DNA, 72 bp, Homo sapiens
ccgtcatggtgacagctcctggcggcagctcccagcggctcctggaggcctgtgctcagggtctcaactcgt

SEQ ID NO: 9891 - DNA, 72 bp, Homo sapiens
gggttgcaggagacctcggaggttacattactgcccggaccctctatctccttcccctcacagcataactca

SEQ ID NO: 9892 - DNA, 72 bp, Homo sapiens
aagagctctgggtaagatgtccttcctcccgggagcggtcgtttgggagtgctccgtgggttaagcaaacgc

SEQ ID NO: 9893 - DNA, 72 bp, Homo sapiens
ctgggcacccagcagcaggggtggagattttgaaacgggtagaggtgactgtcttggcttgtccagtcaggg

SEQ ID NO: 9894 - DNA, 72 bp, Homo sapiens
aactagtcactctccacttccttttcctgcattaacgtacttcctgtctctacaaatgtatctcttctagac

SEQ ID NO: 9895 - DNA, 72 bp, Homo sapiens
gagattgcataacttcttccaggcctcagtttcgacgtctgtcaaatgggagtacattttccctcagcggga

SEQ ID NO: 9896 - DNA, 72 bp, Homo sapiens
gcacagaaagccctgcctgaaagtacctggagacacgagtctgtcagtcttgcctcattaagtgtatggtcg

SEQ ID NO: 9897 - DNA, 72 bp, Homo sapiens
acgcccggcagcctccattctttggtagaacgcagcgcagcaatagccgccaagtcccctcctgggtacagt

SEQ ID NO: 9898 - DNA, 72 bp, Homo sapiens
gagtttcaagttaaattactcctctaatgaggtcacggcaagggaatagtgagatgagaaaagtcttccagc

SEQ ID NO: 9899 - DNA, 72 bp, Homo sapiens
tgctactggcattgggcagtggggctttctacccccggttcttcccactccaatccaggagactactggcct

SEQ ID NO: 9900 - DNA, 72 bp, Homo sapiens
caccacagctgggacatcagtgttcctggtatccacgtcacaccactggcttattcaaagcctgtgaccaac

SEQ ID NO: 9901 - DNA, 72 bp, Homo sapiens
ctctgacgcattctcccggaacaccctggggactgcgagaaagcccctgctggctcactcgtttgctgggat

SEQ ID NO: 9902 - DNA, 72 bp, Homo sapiens
aatcctggcttcctgggtgggtgacttcacctccccgggccttggttttcttgtctgtcagatgaggattgt

SEQ ID NO: 9903 - DNA, 72 bp, Homo sapiens
gtccagtcaggaagtcacacgggcagcagcaatgccggcaagggacgcttgtagcaggaacggggcagcctc

SEQ ID NO: 9904 - DNA, 72 bp, Homo sapiens
tggcctgctgcagcgccatcacccatacactggagcgtgtgcatttttcccctctgttgctgttgtggttgt

SEQ ID NO: 9905 - DNA, 72 bp, Homo sapiens
tccctgacacccagaggatcctcacagtcaagtgacgaggctggggctgaaagcagaagcatgcacagggag

SEQ ID NO: 9906 - DNA, 72 bp, Homo sapiens
gggaggcgcctgcgctgccctcgtggttactcccacgtgctctggggcacgagggcgtccgccagaggcctg

SEQ ID NO: 9907 - DNA, 72 bp, Homo sapiens
gagccaagcgcgagtcggcccagccaaagcgcatgcgcgagccgcgcgccgctttttgcttcacagtgcttc

SEQ ID NO: 9908 - DNA, 72 bp, Homo sapiens
gcaggattggcattcaaacccaagtccaagacacccgctaagccacagcctcaggccactgccattcctggt

SEQ ID NO: 9909 - DNA, 72 bp, Homo sapiens
cgaggccaactccagcaatggcttttgcaaatctgcggaaagtgctcatcagtgacagcctggacccttgct

SEQ ID NO: 9910 - DNA, 72 bp, Homo sapiens
tccatgttgcgtggttaggagcgcagcggaggagccggtcttcctgggtttgagttgcagctccacctcttc

SEQ ID NO: 9911 - DNA, 72 bp, Homo sapiens
ggactcaagttaccgtctgtagccatttctttagccgaatacagctttgttgccacctacctcctttttatt

SEQ ID NO: 9912 - DNA, 72 bp, Homo sapiens
gtgtccgtgccaggctgcggcctccccgcctcccccgcactgagggtactcatggcgtgcaaatgctcccgc

SEQ ID NO: 9913 - DNA, 72 bp, Homo sapiens
gcagcacgttgttcacgcagtagagccaggagcagcgatgtgaaatcagctggaggccacagagggacagat

SEQ ID NO: 9914 - DNA, 72 bp, Homo sapiens
gggcgaacggacaggagtacatttgctggattctccggacagcaccgaggaggtaggtccgcagccaacttt

SEQ ID NO: 9915 - DNA, 72 bp, Homo sapiens
accccacacccgctccccgacccctcagccgccgacgagcccagctggcctccagagtctcccagccccggc

SEQ ID NO: 9916 - DNA, 72 bp, Homo sapiens
tgtcgccgtgagctttgtgtctgcctggattggtgcgggggtgtgtgtgtttgtgtaccggcgtgtgattgt

SEQ ID NO: 9917 - DNA, 72 bp, Homo sapiens
ttgctccacctctggggcaattatcgggagcagggcggccccagtcagacgcaggcagccccaaagcctgaa

SEQ ID NO: 9918 - DNA, 72 bp, Homo sapiens
ttctcttgttatctctctgtttcctagcctacacacgtgcacagacacgtagctgctgttcaggaactgagc

SEQ ID NO: 9919 - DNA, 72 bp, Homo sapiens
ctacatcagccttcagagtagctgggactacccgccgggcccaccaggccccgctaatctttgtggtttttg

SEQ ID NO: 9920 - DNA, 72 bp, Homo sapiens
cgttgattaaaggtagaatcttccactgcagtcagcgacctcttcagcttggtccacacaggcaaagcagag

SEQ ID NO: 9921 - DNA, 72 bp, Homo sapiens
aggtggtgtaggggggaagtgggggtcagtgctaccgtagggagataaccagggaagtttcctgcgagggga

SEQ ID NO: 9922 - DNA, 72 bp, Homo sapiens
aggggtggcttggagccctggcggtggctgcctgacgtcaccggcctctctggcaataggctgcgagctcag

SEQ ID NO: 9923 - DNA, 72 bp, Homo sapiens
ccatacatcacttagccatgccgaggaggctgggccgggcagctgggcagggtatttctgggctcgggtgca

SEQ ID NO: 9924 - DNA, 72 bp, Homo sapiens
tgggccttggcaaggagttaatgggctgggcctctcgcgttagccgagtgtgaccggagctggcagggggcc

SEQ ID NO: 9925 - DNA, 72 bp, Homo sapiens
gagacgttgccgcttctgtttctcccctaacctcgcggacgggattcagcggttccgttcgtctctcggtat

SEQ ID NO: 9926 - DNA, 72 bp, Homo sapiens
gactctcacgtgatttctcctctctgaactagaagcgagctccatcgggccgctgcgcttctatcagcttga

SEQ ID NO: 9927 - DNA, 72 bp, Homo sapiens
tttccttcctctcttcccttcgcagaggtgagtgccgggctcggcgctctgctcctggagctcccgcgggac

SEQ ID NO: 9928 - DNA, 72 bp, Homo sapiens
tgttgcacattgtcacttctacaagtgactaacaccgtcaggataatctaaaactacgaatactacctgact

SEQ ID NO: 9929 - DNA, 72 bp, Homo sapiens
cggcgccgttcaactgcggcagcagaataagcgcgcgtcgttcagcgcagtgtcatcgccgaggcctctagg

SEQ ID NO: 9930 - DNA, 72 bp, Homo sapiens
cgcccctcccctcgcttccttggcctggtttcacgcgactagagaaagttaaagacccgtgtgactgaagag

SEQ ID NO: 9931 - DNA, 72 bp, Homo sapiens
ggctcctcccactgtgccaccctgcctaaccccctcgattttaaaggagaagccaagactctggactttgct

SEQ ID NO: 9932 - DNA, 72 bp, Homo sapiens
gcccttcgcctgtgtgcctggagccagtcccaccacgctcgcgtttcctcctgtagtgctcacaggtcccag

SEQ ID NO: 9933 - DNA, 72 bp, Homo sapiens
ctgtccatcctcatacaccaaccgtatggcaggagcgtggcctgccttgcccagctccccctctaaggacag

SEQ ID NO: 9934 - DNA, 72 bp, Homo sapiens
cctcccgattcagcctcactctccctgccaggcagcgaaaggcccttattgttgctgtgcttgttgcttttg

SEQ ID NO: 9935 - DNA, 72 bp, Homo sapiens
ttacctgaggtcacccagccaggaaacagtagagccggactccagacccatgccacatgaccacaacaagtg

SEQ ID NO: 9936 - DNA, 72 bp, Homo sapiens
caccaggccactcctcccccacaaagaggtcacagcgcataggtactcactgttaaaatgatggaacgcagt

SEQ ID NO: 9937 - DNA, 72 bp, Homo sapiens
ctggggccgtcaccaaaagaacggagcccagggaacgtggagaggagcccagatgcctgaggtgagcaaggc

SEQ ID NO: 9938 - DNA, 72 bp, Homo sapiens
tgctgttgtgcagatgtgttttccctgaatgctttcgtattagtggcgaccagtttctcacagaattgtgaa

SEQ ID NO: 9939 - DNA, 72 bp, Homo sapiens
tcagaatctagaccccccctgtctgttcctcacctcggccaggatcgggggacacccccattttgcagagtc

SEQ ID NO: 9940 - DNA, 72 bp, Homo sapiens
ggtagatcctggtgttggtagcccgagtgacggggcgtggggatgggagatggcttgaagagaattggtgac

SEQ ID NO: 9941 - DNA, 72 bp, Homo sapiens
agtcaaccacttgaaagttttactttttcattagccgcatggaaattgaaagagtatgagctggaaatgatc

SEQ ID NO: 9942 - DNA, 72 bp, Homo sapiens
aacatgtggccccatgtggccatctgcagcttcctcgcacagatggaaaagcagaaactctccctttttaac

SEQ ID NO: 9943 - DNA, 72 bp, Homo sapiens
atataatctcgtggtgggccgttttttaagctggtcggaaaagcgcaatattcgggagggagtgacccgatt

SEQ ID NO: 9944 - DNA, 72 bp, Homo sapiens
acctccagcaccgccgccccagtccccgcagccgccgcgtcaccgccgttttttaaagggtccgcagcctga

SEQ ID NO: 9945 - DNA, 72 bp, Homo sapiens
gctgcccagccaggaccccgtggcccacggggcgtcgtcctgttcctgcagtggcacatgcagttgtgggag

SEQ ID NO: 9946 - DNA, 72 bp, Homo sapiens
ctggttccccggagcaagtgtcctttggtgggagccgcaggaagggagcagcccttcctgcgcgccgggagc

SEQ ID NO: 9947 - DNA, 72 bp, Homo sapiens
tccttgtgccaggcaccctgttgttgctggggaagcggaagggagagacaatcgttaatcggctaaatttct

SEQ ID NO: 9948 - DNA, 72 bp, Homo sapiens
aattcagacaaactattacttcttctttagaggtacgcggaagctccatttcatcacagaaggtctgaaacc

SEQ ID NO: 9949 - DNA, 72 bp, Homo sapiens
ttgaagagtaaagaaatggacatgaacctgtggtccgttcatacggtggaatacctatgcagctgtaaaaat

SEQ ID NO: 9950 - DNA, 72 bp, Homo sapiens
tgaccccgggccagcccagctaggcaaggcctcctcgcttccgagaccccccagcccccgggtgcagtcccc

SEQ ID NO: 9951 - DNA, 72 bp, Homo sapiens
tgaacagtgtaatgccttatgaattcagcaaaagccgaatcatcatctgtttgttccagtgcagacaggctt

SEQ ID NO: 9952 - DNA, 72 bp, Homo sapiens
ctgctcccgcctcattaatgggccgtaccggcggacggtgagagccctggtcttcacattaaagcaccgagc

SEQ ID NO: 9953 - DNA, 72 bp, Homo sapiens
gcccgcctgggcctccggggcgcgaccccctaatccgctttagtcaatatcttatgagctccgcttgggcaa

SEQ ID NO: 9954 - DNA, 72 bp, Homo sapiens
tggcttccttccttcctgaagcctccatctgctgccgagctcagggctttgttagacgctcaccctgcctgt

SEQ ID NO: 9955 - DNA, 72 bp, Homo sapiens
cagggctgagtcctgctggccctccctcttcagctcgggagcaaagcaagacctgctccgctccctatcttg

SEQ ID NO: 9956 - DNA, 72 bp, Homo sapiens
ctggactgtctcctatcatgattcccgggaaatatcgctctgtttctggccgggctgcgaacaacgtaagtt

SEQ ID NO: 9957 - DNA, 72 bp, Homo sapiens
gccaggctttgctgtgaggataccaagaggaatcacgctgagaccagtccccctgggagcccacaccctggt

SEQ ID NO: 9958 - DNA, 72 bp, Homo sapiens
acggcctttctgtggcttttgtttcttaaaaccttcgcatttcatcctccatacgctcacaatggagggcaa

SEQ ID NO: 9959 - DNA, 72 bp, Homo sapiens
ctaaggggcccatgagtggtgtgcagtcgagcgctcggtgttacctgcacgcctctgccactgtcttcgagg

SEQ ID NO: 9960 - DNA, 72 bp, Homo sapiens
cacgtccccctccacatccgccgccattgcggccgcggcattttcctgcaggcaacaaggaagagggccgcg

SEQ ID NO: 9961 - DNA, 72 bp, Homo sapiens
gaaaacggcccccaaatttatgggatcgcttggggcgcagcgattgtaaatcaaaaggcactggacacctcc

SEQ ID NO: 9962 - DNA, 72 bp, Homo sapiens
gccagctgctgggaccgagcccgagggtgcccgcgcggagcacggtcttggctgccccttgccagcatgcag

SEQ ID NO: 9963 - DNA, 72 bp, Homo sapiens
tcatctgtgtttctcctcctccaggatactccaagcgggcctggacgtggagcgtctctccctcaggaattt

SEQ ID NO: 9964 - DNA, 72 bp, Homo sapiens
cttcgaacaaaatgagaacaaatcttttacagcttcgactggatatataaaatcatttagtgtgaaatggct

SEQ ID NO: 9965 - DNA, 72 bp, Homo sapiens
attatttctgtggccagaaagagcatcttgagctccgttttggagaagaggaaactatggcccagagatgaa

SEQ ID NO: 9966 - DNA, 72 bp, Homo sapiens
ggcattctatctcccttctgtggggaaggagctgccgtgaatcctgggcctgcatgtttcctgtatgttggc

SEQ ID NO: 9967 - DNA, 72 bp, Homo sapiens
gctgggaagaggaggaggaaggggaggggggtctgcgctaatcgactctggcgcccacataaggactggcca

SEQ ID NO: 9968 - DNA, 72 bp, Homo sapiens
gtgactctgcatgctgtggggcaaagggctgaatccgacccccaacctttccctgttgggcacataaagctc

SEQ ID NO: 9969 - DNA, 72 bp, Homo sapiens
tgtccctctcccacagggaggcgagcagagaaacacgcctacagcagcccattttttgggggttcatgttgg

SEQ ID NO: 9970 - DNA, 72 bp, Homo sapiens
cgctcaacgtctcataaggtcactaatcccattcacgaaggctccaccctcatgacctaataattacctccc

SEQ ID NO: 9971 - DNA, 72 bp, Homo sapiens
ggaggaagaaagctatagtgcagagttttgcactacgaacctctggatgctagagcagatacagaaattctg

SEQ ID NO: 9972 - DNA, 72 bp, Homo sapiens
ctgaaacctgattgcttcagcccagtagtttgaggcgatagtgtcctattattgcacctgtgaatagcactg

SEQ ID NO: 9973 - DNA, 72 bp, Homo sapiens
aggggcctacccggtgcggcagccttgttggacagcgaggctacctcctgccctctgaacttctgccagcat

SEQ ID NO: 9974 - DNA, 72 bp, Homo sapiens
cttttatgtgggcggagtggtgatcacctaattctcgcagacctggctgggggctgtcttctcctctaatct

SEQ ID NO: 9975 - DNA, 72 bp, Homo sapiens
tgaggtcccattttctggagcaggcaggggctgcccgggctggcatgtgacagagctgggaactcctgcacc

SEQ ID NO: 9976 - DNA, 72 bp, Homo sapiens
ctcttcacaggcacggggaggaagccagagtggtgcggaaggcagtaacctccacctagccaggctgtggct

SEQ ID NO: 9977 - DNA, 72 bp, Homo sapiens
tgtggaaaatccctgacaactgtgtagagacatgtcgtgagggatggcagggagcatagtgaactaggtttg

SEQ ID NO: 9978 - DNA, 72 bp, Homo sapiens
gagtgacagaatcaggctaggtggagtggagtctccgttcccatttccaagtacagggtccgctcccctcaa

SEQ ID NO: 9979 - DNA, 72 bp, Homo sapiens
cccaggtcctgggagtatcgttcaggagaggcgtccgaggagaaggaggaaaaggcacacaaagaaactggg

SEQ ID NO: 9980 - DNA, 72 bp, Homo sapiens
gggcttgtcagcaggagaaggacgcaaggccagaacgcctgatccctagagcctgaatttgccaacagatca

SEQ ID NO: 9981 - DNA, 72 bp, Homo sapiens
caccttgccctccattcagaggtgaatcatctgagcgtcaggttgcccaactccgactggttttgctggagc

SEQ ID NO: 9982 - DNA, 72 bp, Homo sapiens
aatgagcacagccgctggcggccctacacggccaccgtgtgccaccacattgagaacgtgctgaaggaggac

SEQ ID NO: 9983 - DNA, 72 bp, Homo sapiens
aggaccgtgaggacggtcttttttcttgggcaacacgcattatggtcgagagatcagttgttaaaccgcccc

SEQ ID NO: 9984 - DNA, 72 bp, Homo sapiens
tgcaattcaccattaacccttgccctaccagagagcggaagccaaagagagttcccaatcgcttccctcaga

SEQ ID NO: 9985 - DNA, 72 bp, Homo sapiens
gtgatttcataatatacttacactgctatttccttcgactactagcaggaaaagctattgtttgattgatac

SEQ ID NO: 9986 - DNA, 72 bp, Homo sapiens
gagcccagctggcttcacccaatggatctcgcacccgggctgcaggtggtgctgcctgccagtcccggtgtc

SEQ ID NO: 9987 - DNA, 72 bp, Homo sapiens
tcacgcgcacctccgccacgccgggcccgggcctgcgccgctctcacctgtcctggcccgggggtcgctgtc

SEQ ID NO: 9988 - DNA, 72 bp, Homo sapiens
aaacatcagcaattttaatctcacaaggcaaactacggaagaaaagccaaaagtaaaatcctgcttcccttt

SEQ ID NO: 9989 - DNA, 72 bp, Homo sapiens
cttttaaggccctgtttaatcagcctcctacctaccgcctcttcccactacccctcgtttcatccgcactgc

SEQ ID NO: 9990 - DNA, 72 bp, Homo sapiens
tgaaacacacacacagcgataaggcctttccctggcgcaatctgcttccgggagtgacggaaactgctagcg

SEQ ID NO: 9991 - DNA, 72 bp, Homo sapiens
ggttttagagaatgaagggaaggttaatggatagccggagtaggcagagatagtgaattaggaagctatttt

SEQ ID NO: 9992 - DNA, 72 bp, Homo sapiens
actggagctgcccagcttcagcaaaacagggttcccggagcctcagcttccagaactggggatagagcgccg

SEQ ID NO: 9993 - DNA, 72 bp, Homo sapiens
gggacggggtgggctaacacccagctgagtggagccgtcttgcagggctgtgcttgtctgtgcctgggctga

SEQ ID NO: 9994 - DNA, 72 bp, Homo sapiens
cacgagccagccccctcctcctgcctgcccccacgcgcgccaggtgacaggcccacagcccagcgagctggg

SEQ ID NO: 9995 - DNA, 72 bp, Homo sapiens
tagaattacccttggggttgatgaatttactaaaccgtgagatgaattaaataacttattagcctagcactg

SEQ ID NO: 9996 - DNA, 72 bp, Homo sapiens
ctctggggtcagggaggcctgggaggggttagccccgcccactcccggggctcagtcgggtaggcgggccct

SEQ ID NO: 9997 - DNA, 72 bp, Homo sapiens
ataaagctgcccctggctgtactggaggccaattccgggccatagcaggaggaactgagttctaattctgtc

SEQ ID NO: 9998 - DNA, 72 bp, Homo sapiens
gggcgctttgctctgccgggctattgggcgtcctccgctgcacagaaagccagcccagttgggtattactgg

SEQ ID NO: 9999 - DNA, 72 bp, Homo sapiens
agcccttcgcccttcagcatgcactgatggggccacgctcctgtctgggttctgaggattgccagggaaaca

SEQ ID NO: 10000 - DNA, 72 bp, Homo sapiens
tagtccaaggtcatgtagccagcaagaagtcaggccgcgttagaaccatgtccgaagggctccaaacccttg

SEQ ID NO: 10001 - protein, 6 aa, Artificial Sequence
  Description of Artificial Sequence: Synthetic 6xHis tag
HHHHHH

1. A method of determining whether or not an individual uses alcohol, comprising the steps of:
determining the methylation status of at least one CpG dinucleotide in a biological sample from the individual; and
correlating the methylation status of the at least one CpG dinucleotide to determine whether or not the individual uses alcohol.

2. The method of claim 1, wherein the at least one CpG dinucleotide comprises position 71389896 of chromosome 10.

3. The method of claim 2, wherein demethylation at position 71389896 of chromosome 10 is indicative of previous or current alcohol use.

4. The method of claim 3, wherein remethylation at position 71389896 of chromosome 10 is indicative of less or no alcohol use.

5. The method of claim 1, wherein the at least one CpG dinucleotide comprises position 54677008 of chromosome 12.

6. The method of claim 5, wherein demethylation at position 54677008 of chromosome 12 is indicative of previous or current alcohol use.

7. The method of claim 6, wherein remethylation at position 54677008 of chromosome 12 is indicative of less or no alcohol use.

8. The method of claim 1, wherein the at least one CpG dinucleotide comprises position 75262522 of chromosome 8.

9. The method of claim 8, wherein demethylation at position 75262522 of chromosome 8 is indicative of previous or current alcohol use.

10. The method of claim 9, wherein remethylation at position 75262522 of chromosome 8 is indicative of less or no alcohol use.

11. The method of claim 1, wherein the at least one CpG dinucleotide comprises position 92137791 of chromosome 9.

12. The method of claim 11, wherein demethylation at position 92137791 of chromosome 9 is indicative of previous or current alcohol use.

13. The method of claim 12, wherein remethylation at position 92137791 of chromosome 9 is indicative of less or no alcohol use.

14. The method of claim 1, wherein the determining step comprises:
contacting DNA in the biological sample with bisulfite under alkaline conditions to produce bisulfite-treated DNA;
optionally, amplifying the bisulfite-treated DNA to produce amplified bisulfite-treated DNA;
contacting the bisulfite-treated DNA with at least one oligonucleotide that is complementary to a sequence comprising the at least one CpG dinucleotide; and
detecting the methylation status of the at least one CpG dinucleotide.

15. The method of claim 14, wherein the at least one oligonucleotide detects the CpG dinucleotide in the bisulfite-treated DNA in the unmethylated state.

16. The method of claim 14, wherein the at least one oligonucleotide detects the CpG dinucleotide in the bisulfite-treated DNA in the methylated state.

17. The method of claim 1, wherein the biological sample is selected from the group consisting of peripheral blood, lymphocytes, urine, saliva, and buccal cells.

18. The method of claim 1, wherein the methylation status of the at least one CpG dinucleotide is determined using bi-sulfite treated DNA.

19. The method of claim 1, further comprising obtaining self-report data from the individual regarding whether or not the individual is user of alcohol.

20. A computer implemented method for determining whether or not an individual uses alcohol, the method comprising:
obtaining measured data associated with the user, the measured data comprising one or more measured CpG methylation status;
generating a predictive score based on the obtained measured data; and
providing a likelihood of alcohol use by the user based on the predictive score.

21. The method of claim 20, further comprising:
determining the CpG methylation status for the user, wherein a change in methylation status is an indicator of alcohol use.

22. The method of claim 20, further comprising:
outputting a predicted level of alcohol use based on the predictive score.
